(19) United States
(12) Patent Application Publication
(10) Pub. No.: US 2007/0128183 A1
(43) Pub. Date: Jun. 7, 2007

(54) Td antigens

(75) Inventors: Andreas Meinke, Pressbaum (AT); Christine Triska, Vienna (AT); Tamas Henics, Vienna (AT); Duc Minh Bui, Vienna (AT); Eszter Nagy, Vienna (AT); Sonja Prustomersky, Vienna (AT)

Correspondence Address: FULBRIGHT & JAWORSKI L.L.P., 600 CONGRESS AVE., SUITE 2400, AUSTIN, TX, 78701, US

(73) Assignee: INTERCELL AG, Vienna (AT)

(21) Appl. No.: 11/568,436

(22) PCT Filed: Apr. 26, 2005
(86) PCT No.: PCT/EP05/51857

§ 371 Date: Oct. 27, 2006

(30) Foreign Application Priority Data
Apr. 27, 2004 (EP) 04450095.7

(51) Int. Cl. A61K 39/395; C12P 21/04

(52) U.S. Cl. 424/130.1; 435/70.21

(57) ABSTRACT

The present invention discloses isolated nucleic acid molecules encoding a hyperimmune serum reactive antigen or a fragment thereof as well as hyperimmune serum reactive antigens or fragments thereof from enteroaggregative E. coli, enterotexigenic E. coli, S. flexneri and C. jejuni, methods for isolating such antigens and specific uses thereof.

[0001] The present invention relates to isolated nucleic acid molecules, which encode antigens for bacterial pathogens causing travelers' diarrhea, which are suitable for use in preparation of pharmaceutical medicaments for the prevention and treatment of bacterial infections caused by Escherichia coli, Shigella flexneri and Campylobacter jejuni.

[0002] Travelers' diarrhea (TD) is a syndrome characterized by a twofold or greater increase in the frequency of unformed bowel movements and is the most frequent health-problem affecting travelers from industrialised to high-risk countries. Commonly associated symptoms include abdominal cramps, nausea, bloating, urgency, fever, and malaise. Episodes of TD usually begin abruptly, occur during travel or soon after returning home, and are generally self-limited. The most important determinant of risk is the destination of the traveler, but also point of origin, host factors and exposure to contaminated food or water are main risk factors. Attack rates of 20% to 50% are commonly reported among the approximately 50 million travelers from industrialized to developing countries each year. High-risk destinations include most of the developing countries of Latin America, Africa, the Middle East, and Asia. Intermediate-risk destinations include most of the southern European countries and a few Caribbean islands. Low-risk destinations include Canada, northern Europe, Australia, New Zealand, the United States, and some of the Caribbean islands.

[0003] TD is slightly more common in young adults than in older people. The reasons for this difference are unclear, but could include a lack of acquired immunity, more adventurous travel styles, and different eating habits. Attack rates are similar in men and women. The onset of TD is usually within the first week of travel, but can occur at any time during the visit and even after returning home.

[0004] TD is acquired through ingestion of fecally contaminated food or water, or both. Both cooked and uncooked foods might be implicated if they have been improperly handled. Especially risky foods include raw or undercooked meat and seafood and raw fruits and vegetables. Tap water, ice, and unpasteurized milk and dairy products can be associated with increased risk of TD.

[0005] Infectious agents are the primary cause of TD. Travelers from developed countries to developing countries frequently experience a rapid, dramatic change in the type of organisms in their gastrointestinal tract, and often, potential enteric pathogens are among these new organisms. Those individuals, who develop diarrheal disease, have ingested an inoculum of virulent organisms sufficiently large to overcome individual defense mechanisms, resulting in symptoms. The bacterial causative agents for travelers' diarrhea are listed below. They constitute approximately 80% of all identified cases of TD.

| Pathogen | Epidemiological feature |
|---|---|
| Enterotoxigenic and | Worldwide, summer |
| enteroaggregative E. coli (ETEC, | |
| EAEC) | |
| Invasive E. coli | Uncommon cause, wet season |
| Hemorrhagic E. coli | Uncommon cause, food-borne |
| Shigella spp. | Worldwide, summer |
| Campylobacter jejuni, other spp. | Worldwide, year round, esp. winter, |
| | animals |
| Aeromonas (4 species) | Worldwide, summer |
| Plesiomonas shigelloides | Worldwide, summer, Japan |
| Nontyphoidal Salmonella | Worldwide, summer |
| Typhoidal Salmonella | Worldwide, summer |
| Vibrio parahemolyticus | Coastal areas, summer, seafood |
| Yersinia enterocolitica | Northern climatzes, year round, esp. |
| | winter, meats, dogs |
| Vibrio cholera | Indian subcontinent, South Africa |
| Vibrio fluvialis | |

[0006] Travelers' Diarrhea

[0007] TD typically results in three to five loose or watery stools per day. The median duration of untreated diarrhea is 3 to 5 days. Approximately 10% of the cases persist longer than 1 week, approximately 2% longer than 1 month, and <1% longer than 3 months. Persistent diarrhea is, thus, quite uncommon and can differ considerably from acute TD with respect to etiology and risk factors. Diarrhea is accompanied by abdominal cramps in 50-73%, malaise in 50-58%, nausea in 46-50%, feverish feeling in 37%, bloody dysentery in 2-10%, and vomiting in 8-15%. More than half of the cases are mild and do not confine the travelers' activities, but 20% are severe and will confine the traveler to the hotel room for 2-3 days. Travelers can experience more than one episode of TD during a single trip. Rarely is TD life threatening. Diarrhea results from either an imbalance in the absorptive-secretory processes of the bowel or from intestinal hypermotility. Usually, the intestinal tract is a site of absorption for water and electrolytes. In the case of diarrhea, this physiological process is reversed, and the gut becomes the site of water and electrolyte loss. Most of the morbidity from diarrheal illness is due to dehydration and electrolyte imbalances.

[0008] The infectious dose for microorganisms varies from 10¹ to 10² organisms for Shigella and Giardia lamblia up to 10⁸ for Vibrio cholerae and Escherichia coli. Factors that predispose one to acquiring diarrheal illness include H₂-blocker use, broad-spectrum antibiotic use, abnormal intestinal motility, and interruption of the gastric mucosa. Diarrheal disease is caused by pathogens that are typically categorized as inflammatory and non-inflammatory. Inflammatory pathogens (e.g., Shigella) invade the bowel mucosa. Non-inflammatory or “secretory” pathogens (e.g. E. coli) elaborate enterotoxins. Some bacteria that cause “food poisoning” elaborate toxins even prior to ingestion (e.g. Staphylococcus aureus, Bacillus cereus). Enterotoxin-induced diarrheal stool is watery and contains few fecal leukocytes. The prototypic form of secretory diarrhea (cholera) is caused by V. cholerae. In cholera, large amounts of isotonic solution are passed into the bowel, making the patient prone to dehydration. A similar pattern of diarrhea is seen with viruses and enterotoxic E. coli. Inflammatory bacteria enter the endothelium of the distal small bowel and colon, producing fever and abdominal pain. The stool may contain blood, mucus, and abundant fecal leukocytes. Common invasive organisms are Shigella, Campylobacter jejuni, and Salmonella. Yersinia enterocolitica and some forms of E. coli are also invasive.

[0009] Diarrhea in Children

[0010] Infants, 2 years of age or younger are at high risk of acquiring TD. The greatest risk to the infant with diarrhea is dehydration. It is recommended by the WHO to give Oral Rehydration Solution (ORS) for Diarrheal Illness to children to prevent dehydration. Nevertheless, diarrhea is still one of the major causes (10 to 20% of deaths to children under age of 5) contributing to the high mortality rate for children in developing countries (40 to 60 deaths/1,000 live birth).

[0011] In the United States, despite the many improvements in water treatment, sanitation, education, and medical care, diarrhea remains one of the most common pediatric illnesses. Each year, children less than 5 years of age experience 20-35 million episodes of diarrhea, which result in 2-3.5 million doctor visits, greater than 200,000 hospitalizations, and 325-425 deaths. Approximately 65% of the hospitalizations and 85% of the diarrheal deaths occur in the first year of life. While Rotavirus is the most common cause of acute diarrhea among children, accounting for one-fourth of all cases {Cohen, M., 1991}, many other viruses can cause childhood diarrhea as well, including Norwalk-like viruses, enteric adenoviruses, astroviruses, and caliciviruses. Importantly, bacterial pathogens including Shigella, Campylobacter, Salmonella and certain strains of Escherichia coli, are also causes of acute diarrhea in children. Most of these bacterial pathogens are subject to the present invention.

[0012] Foodborne Diseases

[0013] The most common foodborne diseases are infections caused by such bacteria as Salmonella and Campylobacter, or by viruses, such as Norwalk or hepatitis A. Food poisoning caused by bacteria comprises about two-thirds of U.S. poisoning outbreaks linked to a known etiology. C. jejuni alone was responsible for more than 2 million illnesses in the United States in 1999. Specifically, about 75% of reported cases of bacterial food poisoning in the United States can be traced to Campylobacter, Salmonella, Staphylococcus and Clostridium perfringens. In addition, the two bacterial pathogens Shigella and ETEC are also listed among those causing food-borne diarrheal diseases.

[0014] Travelers' diarrhea caused by bacterial pathogens in travelers from developed countries accounts for at least 10 million cases of disease per year. Despite high sanitation standards in developed countries, there are for example in the U.S.A. still millions of cases reported every year, especially among children below 5 years of age, leading to millions of pediatric doctor office visits and a large burden on the healthcare system of the respective countries. In addition, diarrhea caused by enteric bacterial pathogens still kills many children in developing countries and is responsible also for the death of hundreds of children per year in developed countries.

[0015] At present, there is no vaccine on the market that could prevent diarrheal diseases and treatment relies especially in more severe cases mainly on antibiotics. Travelers who develop diarrhea with three or more loose stools in an 8-hour period, especially if associated with nausea, vomiting, abdominal cramps, fever, or blood in the stools, might benefit from antimicrobial treatment. A typical 3- to 5-day illness can often be shortened to 1 to 1½ days by effective antimicrobial agents. For these more severe forms of travelers' diarrhea an antimicrobial treatment may be effective, but is dependent on the etiologic agent and its antibiotic sensitivity. The antibiotic regimen most likely to be effective is ciprofloxacin (500 mg) taken twice a day. Other fluroquinolones, such as norfloxacin, ofloxacin or levofloxacin might be equally as effective. Fewer side effects and less widespread antibiotic resistance have been reported with the fluoroquinolones than with TMP/SMX. Three days of treatment is recommended, although 2 or fewer days might be sufficient. Bismuth subsalicylate (Pepto-Bismol) also may be used as treatment: 1 fluid ounce or two 262 mg tablets every 30 minutes for up to eight doses in a 24 hour period, which can be repeated on a second day. At present there is no report on marketed vaccines for the four pathogens subject of this patent.

[0016] Besides travelers' diarrhea, the same enteric bacterial pathogens cause millions of deaths yearly among young children in developing countries. Furthermore, the enteric bacterial pathogens are very frequently the source of food-borne diseases (see above). Estimates of the number of cases of food-borne disease in the United States range from 6.5 to 81 million cases per year, with from 525 to more than 7000 associated deaths. Thus, there remains a need for an effective treatment to prevent bacterial infections causing diarrhea and travelers' diarrhea. A vaccine could not only prevent relative mild diarrheal diseases, but also many cases of severe disease and high mortality rates in developing countries caused by the targeted pathogens. In developed countries, a vaccine could furthermore prevent the recently increasing cases of food borne diseases caused especially by C. jejuni and E. coli.

[0017] The importance of surface proteins in human immunity to enteric pathogens already has been appreciated. It is apparent that all pathogens express surface proteins with activity relevant to host immune defense; Fimbriae proteins in pathogenic E. coli (e.g. CS2 and CS3; {Altboum, Z. et al., 2001}) and invasion proteins from Shigella spp. {Turbyfill, K. et al., 2000} for example have been shown to be immunogenic and protective in animal models of the respective disease. The major problem with some of these proteins as vaccine candidates seems to be their variability in prevalenve among the different clinical isolates of the enteric pathogens. Thus there is a need to systematically identify vaccine candidates conserved in various clinically relevant strains in order to provide protection against human diarrheal disease as caused by the heterogeneity of clinical strains of the various pathogens.

[0018] A vaccine can contain a whole variety of different antigens. Examples of antigens are whole-killed or attenuated organisms, subfractions of these organisms/tissues, proteins, or, in their most simple form, peptides. Antigens can also be recognized by the immune system in form of glycosylated proteins or peptides and may also be or contain polysaccharides or lipids. Short peptides can be used since for example cytotoxic T-cells (CTL) recognize antigens in form of short usually 8-11 amino acids long peptides in conjunction with major histocompatibility complex (MHC). B-cells can recognize linear epitopes as short as 4-5 amino acids, as well as three-dimensional structures (conformational epitopes). In order to obtain sustained, antigen-specific immune responses, adjuvants need to trigger immune cascades that involve all cells of the immune system. Primarily, adjuvants are acting, but are not restricted in their mode of action, on so-called antigen presenting cells (APCs). These cells usually first encounter the antigen(s) followed by presentation of processed or unmodified antigen to immune effector cells. Intermediate cell types may also be involved. Only effector cells with the appropriate specificity are activated in a productive immune response. The adjuvant may also locally retain antigens and co-injected other factors. In addition the adjuvant may act as a chemoattractant for other immune cells or may act locally and/or systemically as a stimulating agent for the immune system.

[0019] Vaccine development for enteric bacterial diseases has focused on several approaches including attenuated strains, O polysaccharide-based conjugates and proteosomes, but a safe, effective product is still not available. However, ETEC and Shigella are ranked as important targets by the World Health Organisation for the development of vaccines. Currently a number of vaccines against infection by enteric bacterial pathogens are in the research stages of development Most of these efforts are focused on strategies using attenuated, live or killed whole cell vaccine preparations. Only recently were approaches introduced based on recombinant proteins. However, the present invention for the first time assesses the possibility to design a polypeptide-based vaccine against more than one bacterial enteric pathogen

[0020] Protein vaccines are without any doubt of great value for the prevention of TD disease, because the vaccine can cover a broad range of bacterial serotypes and is therefore much less prone to ecological pressure, leading to a replacement disease by novel serotypes, in comparison to polysaccharide-based vaccines. This already suggests that there is a need to develop new generation vaccines composed of proteins, or their derivatives, expressed by all strains under in vivo conditions with the ability to induce opsonizing and/or neutralizing antibodies in humans.

[0021] Certain proteins or enzymes displayed on the surface of or secreted by gram-negative enteric pathogens significantly contribute to pathogenesis and are involved in the disease process caused by these pathogens. Often, these proteins are involved in direct interactions with host tissues or constitute toxins responsible for cytotoxic effects on mucosal host cells. Several surface proteins are characterized as virulence factors, important for pathogenicity, such as the fimbriae proteins of ETEC and EAEC, the flagellin proteins of C. jejuni or the invasin proteins of Shigella. The use of some of the above-described proteins as antigens for potential vaccines as well as a number of additional candidates resulted mainly from a selection based on easiness of identification or chance of availability. There is a demand to identify relevant antigens for enteric bacterial pathogens, which may be shared among several bacteria, in a more comprehensive way.

[0022] The present inventors have developed a method for identification, isolation and production of hyperimmune serum reactive antigens from a specific pathogen, especially from Staphylococcus aureus and Staphylococcus epidermidis (WO 02/059148). However, given the differences in biological property, pathogenic function and genetic background, the Gram-negative enteric pathogens described in this patent are very distinct from the Gram-positive Staphylococcus strains. Importantly, the selection of sera for the identification of antigens from the enteric pathogens is different from that applied to the S. aureus screens. Serum samples to be used as antibody sources were collected from healthy adults living in endemic areas, such as Bangladesh and Egypt, since these individuals encounter the diarrhogenic pathogens multiple times in their life and they become protected by developing pathogen specific antibodies.

[0023] To be able to select for relevant serum sources, a series of ELISA and immunoblotting experiments measuring pathogen-specific IgG antibody levels were performed with bacterial wole cells, lysates and culture supernatant proteins. Sera determined to have the highest titer against the individual pathogens were pooled (5 samples/pool) and IgG purified for screening purposes.

[0024] The present invention applies a high throughput genomic method to identify in vivo expressed pathogen-specific proteins with the ability to induce antibodies in humans during the course of infections and colonization.

[0025] The genomes of the Gram-negative enteric bacteria ETEC, EAEC and S. flexneri are closely related, whereas the genome of C. jejuni is only distantly related to the former three bacterial genomes. Importantly, all four genomes show a number of important differences as compared to the genome of S. aureus. The genomes of ETEC, EAEC and S. flexneri contain app. 4.6 Mb, while S. aureus harbours 2.85 Mb and C. jejuni only 1.64 Mb. While E. coli and Shigella genomes have an average GC content of more than 50%, S. aureus only contains 33%, and C. jejuni app. 30% GC bases. Approximately 52% of the encoded genes of the S. aureus genome are shared with the E. coli and Shigella genomes, while less than 40% are shared between S. aureus and C. jejuni. In addition, S. aureus requires different growth conditions and media for propagation than the enteric pathogens. A list of the most important diseases, which can be inflicted by S. aureus and enteric pathogens is presented below. S. aureus causes mainly nosocomial, opportunistic infections: impetigo, folliculitis, abscesses, boils, infected lacerations, endocarditis, meningitis, septic arthritis, pneumonia, osteomyelitis, scalded skin syndrome (SSS), toxic shock syndrome. The enteric pathogens cause mainly mild to life-threatening diarrheal disease. C. jejuni infections may also lead to a disease termed Guillain-Barré syndrome.

[0026] The complete genome sequence has been determined for C. jejuni NCTC11168, two S. flexneri serotype 2a strains (301 and 2457T), but not for the two E. coli strains ETEC and EAEC. Genomic sequences are available for the E. coli strains K12 and enteropathogenic O157:H7 (see http://www.ncbi.nlm.nih.gov/genomes/Complete.html or http://www.tigr.org/tdb/mdb/mdbcomplete.html).

[0027] The problem underlying the present invention was to provide means for the development of medicaments such as vaccines against bacterial pathogens causing diarrheal disease. More particularly, the problem was to provide an efficient, relevant and comprehensive set of nucleic acid molecules or hyperimmune serum reactive antigens from enteroaggregative and enterotoxigenic E. coli, S. flexneri and C. jejuni that can be used for the manufacture of said medicaments.

[0028] Therefore, the present invention provides an isolated nucleic acid molecule encoding a hyperimmune serum reactive antigen or a fragment thereof comprising a nucleic acid sequence, which is selected from the group consisting of: a nucleic acid molecule having at least 70% sequence identity to a nucleic acid molecule selected from Seq ID No 2-4, 7-9, 14-17, 19, 23-24, 26, 29-30, 33-35, 39-40, 42, 48-49, 52-53, 57-58, 60-64, 66-74, 76-79, 82-84, 86-91, 93-95, 97-99, 103-104, 109-110, 114-118, 121-123, 126-127, 132, 138-142, 145-146, 149, 151-152, 154-161, 163, 165, 167-168, 170-172, 174-300, 925-926, 928-935, 937-946, 949-953, 955-961, 964, 966-970, 972-996, 1069-1108, 1110-1202, 602, 605-607, 612-614, 616, 620-621, 623-624, 626, 628-629, 633-634, 637-638, 641-644, 646-656, 659-664, 666-667, 669-671, 675, 678-679, 681-683, 685-686, 689-690, 695, 698-701, 704-705, 707-762 and 1337-1364.
[0029] a) a nucleic acid molecule which is complementary to the nucleic acid molecule of a),
[0030] b) a nucleic acid molecule comprising at least 15 sequential bases of the nucleic acid molecule of a) or b)
[0031] c) a nucleic acid molecule which anneals under stringent hybridisation conditions to the nucleic add molecule of a), b), or c)
[0032] d) a nucleic acid molecule which, but for the degeneracy of the genetic code, would hybridise to the nucleic add molecule defined in a), b), c) or d).

[0033] According to a preferred embodiment of the present invention the sequence identity is at least 80%, preferably at least 95%/,, especially 100%.

[0034] Furthermore, the present invention provides an isolated nucleic acid molecule encoding a hyperimmune serum reactive antigen or a fragment thereof comprising a nucleic acid sequence selected from the group consisting of
[0035] a) a nucleic acid molecule having at least 96%, preferably at least 98%, especially 100 % sequence identity to a nucleic acid molecule selected from Seq ID No 10-13, 20-21, 27-28, 31-32, 41, 44-47, 50-51, 54-56, 59, 80, 85, 96, 100, 105-107, 112, 124-125, 128-131, 137, 143, 162, 166, 169, 936, 948, 954, 963, 971, 608-611, 617-618, 622, 631-632, 635-636, 639-640, 657, 668, 672, 676-677, 680, 687-688, 691-694 and 702.
[0036] b) a nucleic acid molecule which is complementary to the nucleic acid molecule of a),
[0037] c) a nucleic acid molecule comprising at least 15 sequential bases of the nucleic acid molecule of a) or b)
[0038] d) a nucleic acid molecule which anneals under stringent hybridisation conditions to the nucleic add molecule of a), b) or c),
[0039] e) a nucleic acid molecule which, but for the degeneracy of the genetic code, would hybridise to the nucleic acid defined in a), b), c) or d).

[0040] According to another aspect, the present invention provides an isolated nucleic acid molecule comprising a nucleic acid sequence selected from the group consisting of
[0041] a) a nucleic acid molecule selected from Seq ID No 1, 5-6, 18, 22, 25, 36, 38, 43, 65, 75, 81, 92, 101-102, 108, 111, 113, 119-120, 133-136, 144, 147-148, 150, 153, 164, 173, 927, 947, 962, 965, 1109, 601, 603-604, 615, 619, 625, 627, 630, 645, 658, 665, 673-674, 684, 696-697, 703 and 706.
[0042] b) a nucleic acid molecule which is complementary to the nucleic acid of a),
[0043] c) a nucleic acid molecule which, but for the degeneracy of the genetic code, would hybridise to the nucleic acid defined in a), b), c) or d).

[0044] Preferably, the nucleic acid molecule is DNA or RNA.

[0045] According to a preferred embodiment of the present invention, the nucleic acid molecule is isolated from a genomic DNA, especially from a enteroaggregative E. coli, enterotoxigenic E. coli, S. flexneri and C. jejuni genomic DNA.

[0046] According to the present invention a vector comprising a nucleic acid molecule according to any of the present invention is provided.

[0047] In a preferred embodiment the vector is adapted for recombinant expression of the hyperimmune serum reactive antigens or fragments thereof encoded by the nucleic acid molecule according to the present invention.

[0048] The present invention also provides a host cell comprising the vector according to the present invention.

[0049] According to another aspect the present invention further provides a hyperimmune serum-reactive antigen comprising an amino acid sequence being encoded by a nucleic acid molecule according to the present invention.

[0050] In a preferred embodiment the amino add sequence (polypeptide) is selected from the group consisting of Seq ID No 302-304, 307-309, 314-317, 319, 323-324, 326, 329-330, 333-335, 339-340, 342, 348-349, 352-353, 357-358, 360-364, 366-374, 376-379, 382-384, 386-391, 393-395, 397-399, 403-404, 409-410, 414-418, 421-423, 426-427, 432, 438-442, 445-446, 449, 451-452, 454-461, 463, 465, 467-468, 470-472, 474-600, 997-998, 1000-1007, 1009-1018, 1021-1025, 1027-1033, 1036, 1038-1042, 1044-1068, 1203-1242, 1244-1336, 764, 767-769, 774-776, 778, 782-783, 785-786, 788, 790-791, 795-796, 799-800, 803-806, 808-818, 821-826, 828-829, 831-833, 837, 840-841, 843-845, 847-848, 851-852, 857, 860-863, 866-867, 869-924 and 1365-1393.

[0051] In another preferred embodiment the amino acid sequence (polypeptide) is selected from the group consisting of Seq ID No 310-313, 320-321, 327-328, 331-332, 341, 344-347, 350-351, 354-356, 359, 380, 385, 396, 400, 405-407, 412, 424-425, 428-431, 437, 443, 462, 466, 469, 1008, 1020, 1026, 1035, 1043, 770-773, 779-780, 784, 793-794, 797-798, 801-802, 819, 830, 834, 838-839, 842, 849-850, 853-856 and 864.

[0052] In a further preferred embodiment the amino acid sequence (polypeptide) is selected from the group consisting of Seq ID No 301, 305-306, 318, 322, 325, 336, 338, 343, 365, 375, 381, 392, 401-402, 408, 411, 413, 419-420, 433-436, 444, 447-448, 450, 453, 464, 473, 999, 1019, 1034, 1037, 1243, 763, 765-766, 777, 781, 787, 789, 792, 807, 820, 827, 835-836, 846, 858-859, 865 and 868.

[0053] According to a further aspect the present invention provides fragments of hyperimmune serum-reactive antigens selected from the group consisting of peptides comprising amino acid sequences of column “predicted immunogenic aa” and “location of identified immunogenic region” of Table 1, 2, 3, 4 and 8, and the immunogenic epitopes-column “aa (start-stop)” of Table 6, the serum reactive epitope as defined in Table 7.

[0054] The present invention also provides a process for producing an enteroaggregative E. coli, enterotoxigenic E. coli, S. flexneri and/or C. jejuni hyperimmune serum reactive antigen or a fragment thereof according to the present invention comprising expressing one or more of the nucleic acid molecules according to the present invention in a suitable expression system.

[0055] Moreover, the present invention provides a process for producing a cell, which expresses an enteroaggregative E. coli, enterotoxigenic E. coli, S. flexneri and/or C. jejuni hyperimmune serum reactive antigen or a fragment thereof according to the present invention comprising transforming or transfecting a suitable host cell with the vector according to the present invention.

[0056] According to the present invention a pharmaceutical composition, especially a vaccine, comprising a hyperimmune serum-reactive antigen or a fragment thereof as defined in the present invention or a nucleic acid molecule as defined in the present invention is provided.

[0057] In a preferred embodiment the pharmaceutical composition further comprises an immunostimulatory substance, preferably selected from the group comprising polycationic polymers, especially polycationic peptides, immunostimulatory deoxynucleotides (ODNs), peptides containing at least two LysLeuLys motifs, especially KLKLKLK, neuroactive compounds, especially human growth hormone, alumn, Freund's complete or incomplete adjuvants or combinations thereof.

[0058] In a more preferred embodiment the immunostimulatory substance is a combination of either a polycationic polymer and immunostimulatory deoxynucleotides or of a peptide containing at least two LysLeuLys motifs and immunostimulatory deoxynucleotides.

[0059] In a still more preferred embodiment the polycationic polymer is a polycationic peptide, especially polyarginie.

[0060] According to the present invention the use of a nucleic acid molecule according to the present invention or a hyperimmune serum-reactive antigen or fragment thereof according to the present invention for the manufacture of a pharmaceutical preparation, especially for the manufacture of a vaccine against infection by enteroaggregative E. coli, enterotoxigenic E. coli, S. flexneri and/or C. jejune, is provided.

[0061] Also an antibody, or at least an effective part thereof, which binds at least to a selective part of the hyperimmune serum-reactive antigen or a fragment thereof according to the present invention, is provided herewith.

[0062] In a preferred embodiment the antibody is a monoclonal antibody.

[0063] In another preferred embodiment the effective part of the antibody comprises Fab fragments.

[0064] In a further preferred embodiment the antibody is a chimeric antibody.

[0065] In a still preferred embodiment the antibody is a humanized antibody.

[0066] The present invention also provides a hybridoma cell line, which produces an antibody according to the present invention.

[0067] Moreover, the present invention provides a method for producing an antibody according to the present invention, characterized by the following steps:
[0068] initiating an immune response in a non-human animal by administrating an hyperimmune serum-reactive antigen or a fragment thereof, as defined in the invention, to said animal,
[0069] removing an antibody containing body fluid from said animal, and
[0070] producing the antibody by subjecting said antibody containing body fluid to further purification steps.

[0071] Accordingly, the present invention also provides a method for producing an antibody according to the present invention, characterized by the following steps:
[0072] initiating an immune response in a non-human animal by administrating an hyperimmune serum-reactive antigen or a fragment thereof, as defined in the present invention, to said animal,
[0073] removing the spleen or spleen cells from said animal,
[0074] producing hybridoma cells of said spleen or spleen cells,
[0075] selecting and cloning hybridoma cells specific for said hyperimmune serum-reactive antigens or a fragment thereof,
[0076] producing the antibody by cultivation of, said cloned hybridoma cells and optionally further purification steps.

[0077] The antibodies provided or produced according to the above methods may be used for the preparation of a medicament for treating or preventing infections caused by enteroaggregative E. coli, enterotoxigenic E. coli, S. flexneri and/or C. jejuni.

[0078] According to another aspect the present invention provides an antagonist, which binds to a hyperimmune serum-reactive antigen or a fragment thereof according to the present invention.

[0079] Such an antagonist capable of binding to a hyperimmune serum-reactive antigen or fragment thereof according to the present invention may be identified by a method comprising the following steps:
[0080] a) contacting an isolated or immobilized hyperimmune serum-reactive antigen or a fragment thereof according to the present invention with a candidate antagonist under conditions to permit binding of said candidate antagonist to said hyperimmune serum-reactive antigen or fragment, in the presence of a component capable of providing a detectable signal in response to the binding of the candidate antagonist to said hyperimmune serum reactive antigen or fragment thereof; and
[0081] b) detecting the presence or absence of a signal generated in response to the binding of the antagonist to the hyperimmune serum reactive antigen or the fragment thereof.

[0082] An antagonist capable of reducing or inhibiting the interaction activity of a hyperimmune serum-reactive antigen or a fragment thereof according to the present invention to its interaction partner may be identified by a method comprising the following steps:
[0083] a) providing a hyperimmune serum reactive antigen or a hyperimmune fragment thereof according to the present invention,
[0084] b) providing an interaction partner to said hyperimmune serum reactive antigen or a fragment thereof, especially an antibody according to the present invention,
[0085] c) allowing interaction of said hyperimmune serum reactive antigen or fragment thereof to said interaction partner to form an interaction complex,
[0086] d) providing a candidate antagonist,
[0087] e) allowing a competition reaction to occur between the candidate antagonist and the interaction complex,
[0088] f) determining whether the candidate antagonist inhibits or reduces the interaction activities of the hyperimmune serum reactive antigen or the fragment thereof with the interaction partner.

[0089] The hyperimmune serum reactive antigens or fragments thereof according to the present invention may be used for the isolation and/or purification and/or identification of an interaction partner of said hyperimmune serum reactive antigen or fragment thereof.

[0090] The present invention also provides a process for in vitro diagnosing a disease related to expression of a hyperimmune serum-reactive antigen or a fragment thereof according to the present invention comprising determining the presence of a nucleic acid sequence encoding said hyperimmune serum reactive antigen or fragment thereof according to the present invention or the presence of the hyperimmune serum reactive antigen or fragment thereof according to the present invention.

[0091] The present invention also provides a process for in vitro diagnosis of a bacterial infection, especially a enteroaggregative E. coli, enterotoxigenic E. coli, S. flexneri and/or C. jejuni infection, comprising analyzing for the presence of a nucleic acid sequence encoding said hyperimmune serum reactive antigen or fragment thereof according to the present invention or the presence of the hyperimmune serum reactive antigen or fragment thereof according to the present invention.

[0092] Moreover, the present invention provides the use of a hyperimmune serum reactive antigen or fragment thereof according to the present invention for the generation of a peptide binding to said hyperimmune serum reactive antigen or fragment thereof, wherein the peptide is an anticaline.

[0093] The present invention also provides the use of a hyperimmune serum-reactive antigen or fragment thereof according to the present invention for the manufacture of a functional nucleic acid, wherein the functional nucleic acid is selected from the group comprising aptamers and spiegelmers.

[0094] The nucleic acid molecule according to the present invention may also be used for the manufacture of a functional ribonucleic acid, wherein the functional ribonucleic add is selected from the group comprising ribozymes, antisense nucleic acids and siRNA.

[0095] The present invention advantageously provides an efficient, relevant and comprehensive set of isolated nucleic acid molecules and their encoded hyperimmune serum reactive antigens or fragments thereof identified from enteroaggregative E. coli, enterotoxigenic E. coli, S. flexneri and/or C. jejuni using an antibody preparation from multiple human plasma pools and surface expression libraries derived from the genome of enteroaggregative E. coli, enterotoxigenic E. coli, S. flexneri and/or C. jejuni. Thus, the present invention fulfils a widely felt demand for enteroaggregative E. coli, enterotoxigenic E. coli, S. flexneri and/or C. jejuni antigens, vaccines, diagnostics and products useful in procedures for preparing antibodies and for identifying compounds effective against infections caused by enteroaggregative E. coli, enterotoxigenic E. coli, S. flexneri and/or C. jejuni.

[0096] An effective vaccine should be composed of proteins or polypeptides, which are expressed by all strains and are able to induce high affinity, abundant antibodies against cell surface components of enteroaggregative E. coli, enterotoxigenic E. coli, S. flexneri and/or C. jejuni. The antibodies should be IgG1 and/or IgG3 for opsonization, and any IgG subtype and IgA for neutralisation of adherence and toxin action. A chemically defined vaccine must be definitely superior compared to a whole cell vaccine (attenuated or killed), since components of enteroaggregative E. coli, enterotoxigenic E. coli, S. flexneri and/or C. jejuni, which cross-react with human tissues or inhibit opsonization can be eliminated, and the individual proteins inducing protective antibodies and/or a protective immune response can be selected.

[0097] The approach, which has been employed for the present invention, is based on the interaction of proteins or peptides encoded by enteroaggregative E. coli, enterotoxigenic E. coli, S. flexneri and/or C. jejuni with the antibodies present in human sera. The antibodies produced against enteroaggregative E. coli, enterotoxigenic E. coli, S. flexneri and/or C. jejuni by the human immune system and present in human sera are indicative of the in vivo expression of the antigenic proteins and their immunogenicity. In addition, the antigenic proteins as identified by the bacterial surface display expression libraries using pools of pre-selected sera, are processed in a second and third round of screening by individual selected or generated sera. Thus the present invention supplies an efficient, relevant, comprehensive set of antigens as a pharmaceutical composition, especially a vaccine preventing infections caused by enteroaggregative E. coli, enterotoxigenic E. coli, S. flexneri and/or C. jejuni.

[0098] In the antigen identification program for identifying a comprehensive set of antigens according to the present invention, at least two different bacterial surface expression libraries from each pathogen are screened with several serum pools or plasma fractions or other pooled antibody containing body fluids (antibody pools). The antibody pools are derived from a serum collection, which has been tested against antigenic compounds of enteroaggregative E. coli, enterotoxigenic E. coli, S. flexneri and/or C. jejuni, such as whole cell, total extracts and culture supernatant proteins. Preferably, two pools of sera (with 10 individual samples) are used. Sera determined to have high ELISA titter have to react with multiple proteins in immunoblotting in order to be considered hyperimmune and therefore relevant in the screening method applied for the present invention.

[0099] The expression libraries as used in the present invention should allow expression of all potential antigens, e.g. derived from all secreted and surface proteins of enteroaggregative E. coli, enterotoxigenic E. coli, S. flexneri and C. jejuni. Bacterial surface display libraries will be represented by a recombinant library of a bacterial host displaying a (total) set of expressed peptide sequences of enteroaggregative E. coli, enterotoxigenic E. coli, S. flexneri and C. jejuni on two selected outer membrane proteins (LamB and FhuA) at the bacterial host membrane {Georgiou, G., 1997}; {Etz, H. et al., 2001}. One of the advantages of using recombinant expression libraries is that the identified hyperimmune serum-reactive antigens may be instantly produced by expression of the coding sequences of the screened and selected dones expressing the hyperimmune serum-reactive antigens without further recombinant DNA technology or cloning steps necessary.

[0100] The comprehensive set of antigens identified by the described program according to the present invention is analysed further by one or more additional rounds of screening. Therefore individual antibody preparations or antibodies generated against selected peptides, which were identified as immunogenic are used. According to a preferred embodiment the individual antibody preparations for the second round of screening are derived from healthy adults and/or challenged adults who show an antibody titer above a certain minimum level, for example an antibody titer being higher than 80 percentile, preferably higher than 90 percentile, especially higher than 95 percentile of the human (patient or healthy individual) sera tested. Using such high titer individual antibody preparations in the second screening round allows a very selective identification of the hyperimmune serum-reactive antigens and fragments thereof from enteroaggregative E. coli, enterotoxigenic E. coli, S. flexneri and/or C. jejuni.

[0101] Following the comprehensive screening procedure, the selected antigenic proteins, expressed as recombinant proteins or in vitro translated products, in case it can not be expressed in prokaryotic expression systems, or the identified antigenic peptides (produced synthetically) are tested in a second screening by a series of ELISA and Western blotting assays for the assessment of their immunogenicity with a large human serum collection (minimum ˜150 healthy and patients sera).

[0102] It is important that the individual antibody preparations (which may also be the selected serum) allow a selective identification of the most promising candidates of all the hyperimmune serum-reactive antigens from all the promising candidates from the first round. Therefore, preferably at least 10 individual antibody preparations (i.e. antibody preparations (e.g. sera) from at least 10 different individuals having suffered from an infection to the chosen pathogen) should be used in identifying these antigens in the second screening round. Of course, it is possible to use also less than 10 individual preparations, however, selectivity of the step may not be optimal with a low number of individual antibody preparations. On the other hand, if a given hyperimmune serum-reactive antigen (or an antigenic fragment thereof) is recognized by at least 10 individual antibody preparations, preferably at least 30, especially at least 50 individual antibody preparations, identification of the hyperimmune serum-reactive antigen is also selective enough for a proper identification. Hyperimmune serum-reactivity may of course be tested with as many individual preparations as possible (e.g. with more than 100 or even with more than 1,000).

[0103] Therefore, the relevant portion of the hyperimmune serum-reactive antibody preparations according to the method of the present invention should preferably be at least 10, more preferred at least 30, especially at least 50 individual antibody preparations. Alternatively (or in combination) hyperimmune serum-reactive antigens may preferably be also identified with at least 20%, preferably at least 30%, especially at least 40% of all individual antibody preparations used in the second screening round.

[0104] According to a preferred embodiment of the present invention, the sera from which the individual antibody preparations for the second round of screening are prepared (or which are used as antibody preparations), are selected by their titer against enteroaggregative E. coli, enterotoxigenic E. coli, S. flexneri and/or C. jejuni (e.g. against a preparation of these pathogens, such as a lysate, cell wall components and recombinant proteins). Preferably, some are selected with a total IgA titer above 300 U, especially above 500 U, and/or an IgG titer above 5,000 U, especially above 10,000 U (U=units, calculated from the OD_{405 nm} reading at a given dilution) when the whole organism (total lysate or whole cells) is used as antigen in the ELISA.

[0105] The antibodies produced against streptococci by the human immune system and present in human sera are indicative of the in vivo expression of the antigenic proteins and their immunogenicity. The recognition of linear epitopes recognized by serum antibodies can be based on sequences as short as 4-5 amino acids. Of course it does not necessarily mean that these short peptides are capable of inducing the given antibody in vivo. For that reason the defined epitopes, polypeptides and proteins are further to be tested in animals (mainly in mice) for their capacity to induce antibodies against the selected proteins in vivo.

[0106] The preferred antigens are located on the cell surface or secreted, and are therefore accessible extracellularly. Antibodies against cell wall proteins are expected to serve multiple purposes: to inhibit adhesion, to interfere with nutrient acquisition, to inhibit immune evasion and to promote phagocytosis {Hornef, M. et al., 2002}. Antibodies against secreted proteins are beneficial in neutralisation of their function as toxin or virulence component. It is also known that bacteria communicate with each other through secreted proteins. Neutralizing antibodies against these proteins will interrupt growth-promoting cross-talk between or within infection causing pathogen species. Bioinformatic analyses (signal sequences, cell wall localisation signals, transmembrane domains) proved to be very useful in assessing cell surface localisation or secretion. The experimental approach includes the isolation of antibodies with the corresponding epitopes and proteins from human serum, and the generation of immune sera in mice against (poly) peptides selected by the bacterial surface display screens. These sera are then used in a third round of screening as reagents in at least one of the following assays: cell surface staining of enteroaggregative E. coli, enterotoxigenic E. coli, S. flexneri and C. jejuni grown under different conditions (FACS or microscopy), determination of neutralizing capacity (toxin, adherence), and promotion of opsonization and phagocytosis (in vitro phagocytosis assay).

[0107] For that purpose, bacterial E. coli clones are directly injected into mice and immune sera are taken and tested in the relevant in vitro assay for functional opsonic or neutralizing antibodies. Alternatively, specific antibodies may be purified from human or mouse sera using peptides or proteins as substrate.

[0108] Most pathogens enter at mucosal surfaces lining digestive, respiratory, and urino-reproductive tracts, which are collectively the largest immunologically active tissues in body, rendering the mucosal immune system the first line of defense. Host defense against enteric pathogenic bacteria relies mainly on the mucosal immune system, including intestinal secretory IgA, mucosal cellular immunity and toxin neutralisation. Vaccines against enteric pathogens should therefore stimulate both mucosal and humoral immunity, which combined provide good protective immunity against these pathogens. Antigens need to reach the gut associated lymphoid tissues (GALT; M-cells residing in the epithelium over Peyer's patches and lymphoid follicles), where they are recognized. Stimulation of these specific lymphocytes in the mucosal immune system and the resulting communication between the mucosal and serum systems leads to production of sIgA (secretory IgA), which is characteristic of a mucosal response and can for example prevent interaction of pathogens with receptors on mucosal surfaces. Inducing high affinity secretory antibodies by vaccination helps the immune system to eliminate bacteria and toxins. As the method according to the present invention uses antibodies from human serum, which were induced by previous encounters with the respective pathogens, it is an optimal tool for the identification of antigenic proteins from enteroaggregative E. coli, enterotoxigenic E. coli, S. flexneri and C. jejuni.

[0109] According to the antigen identification method used hereir, the present invention can surprisingly provide a set of comprehensive novel nucleic acids and novel hyperimmune serum reactive antigens and fragments thereof of enteroaggregative E. coli, enterotoxigenic E. coli, S. flexneri and C. jejuni, among other things, as described below. According to one aspect, the invention particularly relates to the nucleotide sequences encoding hyperimmune serum reactive antigens which sequences are set forth in the Sequence listing Seq ID No: 1-300, 601-762, 925-996 and 1069-1202 and the corresponding encoded amino acid sequences representing hyperimmune serum reactive antigens are set forth in the Sequence Listing Seq ID No 301-600, 763-924, 997-1068 and 1203-1336.

[0110] In a preferred embodiment of the present invention, a nucleic acid molecule is provided which exhibits 70% identity over their entire length to a nucleotide sequence set forth with Seq ID No 1-300, 601-762, 925-996 and 1069-1202. Most highly preferred are nucleic adds that comprise a region that is at least 80% or at least 85% identical over their entire length to a nucleic acid molecule set forth with Seq ID No 1-300, 601-762, 925-996 and 1069-1202. In this regard, nucleic acid molecules at least 90%, 91%, 92%, 93%, 94%, 95%, or 96% identical over their entire length to the same are particularly preferred. Furthermore, those with at least 97% are highly preferred, those with at least 98% and at least 99% are particularly highly preferred, with at least 99% or 99.5% being the more preferred, with 100% identity being especially preferred. Moreover, preferred embodiments in this respect are nucleic acids, which encode hyperimmune serum reactive antigens or fragments thereof (polypeptides) which retain substantially the same biological function or activity as the mature polypeptide encoded by said nucleic acids set forth in the Seq ID No 301-600, 763-924, 997-1068 and 1203-1336.

[0111] Identity, as known in the art and used herein, is the relationship between two or more polypeptide sequences or two or more polynucleotide sequences, as determined by comparing the sequences. In the art, identity also means the degree of sequence relatedness between polypeptide or polynucleotide sequences, as the case may be, as determined by the match between strings of such sequences. Identity can be readily calculated. While there exist a number of methods to measure identity between two polynucleotide or two polypeptide sequences, the term is well known to skilled artisans (e.g. Sequence Analysis in Molecular Biology, von Heinje, G., Academic Press, 1987). Preferred methods to determine identity are designed to give the largest match between the sequences tested. Methods to determine identity are codified in computer programs. Preferred computer program methods to determine identity between two sequences include, but are not limited to, GCG program package {Devereux, J. et al., 1984}, BLASTP, BLASTN, and PASTA {Altschul, S. et al, 1990}.

[0112] According to another aspect of the invention, nucleic acid molecules are provided which exhibit at least 96%, preferably at least 98%, expecially 100% identity to the nucleic acid sequence set forth with Seq ID No 10-13, 20-21, 27-28, 31-32, 41, 44-47, 50-51, 54-56, 59, 80, 85, 96, 100, 105-107, 112, 124-125, 128-131, 137, 143, 162, 166, 169, 936, 948, 954, 963, 971, 608-611, 617-618, 622, 631-632, 635-636, 639-640, 657, 668, 672, 676-677, 680, 687-688, 691-694 and 702.

[0113] According to a further aspect of the present invention, nucleic acid molecules are provided which are identical to the nucleic acid sequences set forth with Seq ID No 1, 5-6, 18, 22, 25, 36, 38,43, 65, 75, 81, 92, 101-102, 108, 111, 113, 119-120, 133-136, 144, 147-148, 150, 153, 164, 173, 927, 947, 962, 965, 1109, 601, 603-604, 615, 619, 625, 627, 630, 645, 658, 665, 673-674, 684, 696-697, 703 and 706.

[0114] The nucleic acid molecules according to the present invention can as a second alternative also be a nucleic acid molecule, which is at least essentially complementary to the nucleic add described as the first alternative above. As used herein complementary means that a nucleic acid strand is base pairing via Watson-Crick base pairing with a second nucleic acid strand. Essentially complementary as used herein means that the base pairing is not occurring for all of the bases of the respective strands but leaves a certain number or percentage of the bases unpaired or wrongly paired. The percentage of correctly pairing bases is preferably at least 70%, more preferably 80%, even more preferably 90% and most preferably any percentage higher than 90%. It is to be noted that a percentage of 70% matching bases is considered as homology and the hybridization having this extent of matching base pairs is considered as stringent Hybridization conditions for this kind of stringent hybridization may be taken from Current Protocols -in Molecular Biology (ohn Wiley and Sons, Inc., 1987). More particularly, the hybridization conditions can be as follows:
[0115] Hybridization performed e.g. in 5×SSPE, 5× Denhardt's reagent, 0.1% SDS, 100 g/mL sheared DNA at 68° C.
[0116] Moderate stringency wash in 0.2×SSC, 0.1% SDS at 42° C.
   [0117] High stringency wash in 0.1×SSC, 0.1% SDS at 68° C.

[0118] Genomic DNA with a GC content of 50% has an approximate T_{M} of 96° C. For 1% mismatch, the T_{M} is reduced by approximately 1° C.

[0119] In addition, any of the further hybridization conditions described herein are in principle applicable as well.

[0120] Of course, all nucleic acid sequence molecules which encode the same polypeptide molecule as those identified by the present invention are encompassed by any disclosure of a given coding sequence, since the degeneracy of the genetic code is directly applicable to unambiguously determine all possible nucleic acid molecules which encode a given polypeptide molecule, even if the number of such degenerated nucleic acid molecules may be high. This is also applicable for fragments of a given polypeptide, as long as the fragments encode a polypeptide being suitable to be used in a vaccination connection, e.g. as an active or passive vaccine.

[0121] The nucleic add molecule according to the present invention can as a third alternative also be a nucleic acid which comprises a stretch of at least 15 bases of the nucleic acid molecule according to the first and second alternative of the nucleic acid molecules according to the present invention as outlined above. Preferably, the bases form a contiguous stretch of bases. However, it is also within the scope of the present invention that the stretch consists of two or more moieties, which are separated by a number of bases.

[0122] The present nucleic acids may preferably consist of at least 20, even more preferred at least 30, especially at least 50 contiguous bases from the sequences disclosed herein. The suitable length may easily be optimized due to the planned area of use (e.g. as (PCR) primers, probes, capture molecules (e.g. on a (DNA) chip), etc.). Preferred nucleic acid molecules contain at least a contiguous 15 base portion of one or more of the predicted immunogenic amino acid sequences listed in tables 1 to 4. Specifically preferred are nucleic acids containing a contiguous portion of a DNA sequence of any sequence in the sequence protocol of the present application which shows 1 or more, preferably more than 2, especially more than 5, non-identical nucleic acid residues compared to the enteroaggregative E. coli, enterotoxigenic E. coli, S. flexneri 2a and C. jejuni NCTC 11168 genomes (NCBI accession: C. jejuni, NC 002163; S. flexneri 2a 301, NC 004337; ETEC & EAEC, no genome published) or the sequences listed in this patent and/or any other published genome sequence or parts thereof, (E. coli K12, NC 000913; E. coli O157:H7, NC 002695; S. flexneri 2a 2457T, NC 004741). Specifically preferred non-identical nucleic acid residues are residues, which lead to a non-identical amino acid residue. Preferably, the nucleic acid sequences encode polypeptides having at least 1, preferably at least 2, preferably at least 3 different amino acid residues compared to the published or listed enteroaggregative E. coli, enterotoxigenic E. coli, S. flexneri and C. jejuni counterparts mentioned above. Also such isolated polypeptides, being fragments of the proteins (or the whole protein) mentioned herein e.g. in the sequence listing, having at least 6, 7, or 8 amino acid residues and being encoded by these nudeic acids are preferred.

[0123] The nucleic acid molecule according to the present invention can as a fourth alternative also be a nucleic acid molecule which anneals under stringent hybridisation conditions to any of the nucleic acids of the present invention according to the above outlined first, second, and third alternative. Stringent hybridisation conditions are typically those described herein.

[0124] Finally, the nucleic acid molecule according to the present invention can as a fifth alternative also be a nucleic acid molecule which, but for the degeneracy of the genetic code, would hybridise to any of the nucleic acid molecules according to any nucleic acid molecule of the present invention according to the first, second, third, and fourth alternative as outlined above. This kind of nucleic acid molecule refers to the fact that preferably the nucleic acids according to the present invention code for the hyperimmune serum reactive antigens or fragments thereof according to the present inventions lTis kind of nucleic acid molecule is particularly useful in the detection of a nucleic acid molecule according to the present invention and thus the diagnosis of the respective microorganisms such as enteroaggregative E. coli, enterotoxigenic E. coli, S. flexneri and/or C. jejuni and any disease or diseased condition where these kinds of microorganims are involved. Preferably, the hybridisation would occur or be preformed under stringent conditions as described in connection with the fourth alternative described above.

[0125] Nucleic acid molecule as used herein generally refers to any ribonucleic acid molecule or deoxyribonucleic acid molecule, which may be unmodified RNA or DNA or modified RNA or DNA. Thus, for instance, nucleic acid molecule as used herein refers to, among other, single-and double-stranded DNA, DNA that is a mixture of single- and double-stranded RNA, and RNA that is a mixture of single- and double-stranded regions, hybrid molecules comprising DNA and RNA that may be single-stranded or, more typically, double-stranded, or triple-stranded, or a mixture of single- and double-stranded regions. In addition, nucleic acid molecule as used herein refers to triple-stranded regions comprising RNA or DNA or both RNA and DNA. The strands in such regions may be from the same molecule or from different molecules. The regions may include all of one or more of the molecules, but more typically involve only a region of some of the molecules. One of the molecules of a triple-helical region often is an oligonucleotide. As used herein, the term nucleic acid molecule includes DNAs or RNAs as described above that contain one or more modified bases. Thus, DNAs or RNAs with backbones modified for stability or for other reasons are “nucleic acid molecule” as that term is intended herein. Moreover, DNAs or RNAs comprising unusual bases, such as inosine, or modified bases, such as tritylated bases, to name just two examples, are nucleic acid molecule as the term is used herein. It will be appreciated that a great variety of modifications have been made to DNA and RNA that serve many useful purposes known to those of skill in the art. The term nucleic acid molecule as it is employed herein embraces such chemically, enzymatically or metabolically modified forms of nucleic add molecule, as well as the chemical forms of DNA and RNA characteristic of viruses and cells, including simple and complex cells, inter alia. The term nucleic acid molecule also embraces short nucleic acid molecules often referred to as oligonucleotide(s). “Polynudeotide” and “nucleic acid” or “nucleic acid molecule” are often used interchangeably herein.

[0126] Nucleic acid molecules provided in the present invention also encompass numerous unique fragments, both longer and shorter than the nucleic acid molecule sequences set forth in the sequencing listing of the enteroaggregative E. coli, enterotoxigenic E. coli, S. flexneri and/or C. jejuni coding regions, which can be generated by standard cloning methods. To be unique, a fragment must be of sufficient size to distinguish it from other known nucleic acid sequences, most readily determined by comparing any selected enteroaggregative E. coli, enterotoxigenic E. coli, S. flexneri and/or C. jejuni fragment to the nucleotide sequences in computer databases such as GenBank.

[0127] Additionally, modifications can be made to the nucleic acid molecules and polypeptides that are encompassed by the present invention. For example, nucleotide substitutions can be made which do not affect the polypeptide encoded by the nucleic acid, and thus any nucleic add molecule which encodes a hyperimmune serum reactive antigen or fragments thereof is encompassed by the present invention.

[0128] Furthermore, any of the nucleic add molecules encoding hyperimmune serum reactive antigens or fragments thereof provided by the present invention can be functionally linked, using standard techniques such as standard cloning techniques, to any desired regulatory sequences, whether an enteroaggregative E. coli, enterotoxigenic E. coli, S. flexneri and/or C. jejuni regulatory sequence or a heterologous regulatory sequence, heterologous leader sequence, heterologous marker sequence or a heterologous coding sequence to create a fusion protein.

[0129] Nucleic add molecules of the present invention may be in the form of RNA, such as mRNA or cRNA, or in the form of DNA, including, for instance, cDNA and genomic DNA obtained by cloning or produced by chemical synthetic techniques or by a combination thereof. The DNA may be triple-stranded, double-stranded or single-stranded. Single-stranded DNA may be the coding strand, also known as the sense strand, or it may be the non-coding strand, also referred to as the anti-sense strand.

[0130] The present invention further relates to variants of the herein above described nucleic acid molecules which encode fragments, analogs and derivatives of the hyperimmune serum reactive antigens and fragments thereof having a deducted enteroaggregative E. coli, enterotoxigenic E. coli, S. flexneri and/or C. jejuni amino acid sequence set forth in the Sequence Listing. A variant of the nucleic acid molecule may be a naturally occurring variant such as a naturally occurring allelic variant, or it may be a variant that is not known to occur naturally. Such non-naturally occurring variants of the nucleic acid molecule may be made by mutagenesis techniques, including those applied to nucleic add molecules, cells or organisms.

[0131] Among variants in this regard are variants that differ from the aforementioned nucleic acid molecules by nucleotide substitutions, deletions or additions. The substitutions, deletions or additions may involve one or more nucleotides. The variants may be altered in coding or non-coding regions or both. Alterations in the coding regions may produce conservative or non-conservative amino acid substitutions, deletions or additions. Preferred are nucleic acid molecules encoding a variant, analog, derivative or fragment, or a variant, analogue or derivative of a fragment, which have an enteroaggregative E. coli, enterotoxigenic E. coli, S. flexneri and/or C. jejuni sequence as set forth in the Sequence Listing, in which several, a few, 5 to 10, 1 to 5, 1 to 3, 2, 1 or no amino acid(s) is substituted, deleted or added, in any combination. Especially preferred among these are silent substitutions, additions and deletions, which do not alter the properties and activities of the enteroaggregative E. coli, enterotoxigenic E. coli, S. flexneri and/or C. jejuni polypeptides set forth in the Sequence Listing. Also especially preferred in this regard are conservative substitutions.

[0132] The peptides and fragments according to the present invention also include modified epitopes wherein preferably one or two of the amino acids of a given epitope are modified or replaced according to the rules disclosed in e.g. {Tourdot, S. et al, 2000}, as well as the nucleic acid sequences encoding such modified epitopes.

[0133] It is dear that also epitopes derived from the present epitopes by amino acid exchanges improving, conserving or at least not significantly impeding the T cell activating capability of the epitopes are covered by the epitopes according to the present invention. Therefore the present epitopes also cover epitopes, which do not contain the original sequence as derived from enteroaggregative E. coli, enterotoxigenic E. coli, S. flexneri and/or C. jejuni, but trigger the same or preferably an improved T cell response. These epitope are referred to as “heteroclitic”; they need to have a similar or preferably greater affinity to MHC/HLA molecules, and the need the ability to stimulate the T cell receptors (TCR) directed to the original epitope in a similar or preferably stronger manner.

[0134] Heteroclitic epitopes can be obtained by rational design i.e. taking into account the contribution of individual residues to binding to MHC/HLA as for instance described by {Rammensee, H. et al., 1999}, combined with a systematic exchange of residues potentially interacting with the TCR and testing the resulting sequences with T cells directed against the original epitope. Such a design is possible for a skilled man in the art without much experimentation.

[0135] Another possibility includes the screening of peptide libraries with T cells directed against the original epitope. A preferred way is the positional scanning of synthetic peptide libraries. Such approaches have been described in detail for instance by {Hemmer, B. et al., 1999} and the references given therein.

[0136] As an alternative to epitopes represented by the present derived amino acid sequences or heteroclitic epitopes, also substances mimicking these epitopes e.g. “peptidemimetica” or “retro-inverso-peptides” can be applied.

[0137] Another aspect of the design of improved epitopes is their formulation or modification with substances increasing their capacity to stimulate T cells. These include T helper cell epitopes, lipids or liposomes or preferred modifications as described in WO 01/78767.

[0138] Another way to increase the T cell stimulating capacity of epitopes is their formulation with immune stimulating substances for instance cytokines or chemokines like interleukin-2, -7, -12, -18, class I and II interferons (IFN), especially IFN-gamma, GM-CSF, TNF-alpha, flt3-ligand and others.

[0139] As discussed additionally herein regarding nucleic acid molecule assays of the invention, for instance, nucleic acid molecules of the invention as discussed above, may be used as a hybridization probe for RNA, cDNA and genomic DNA to isolate full-length cDNAs and genomic clones encoding polypeptides of the present invention and to isolate cDNA and genomic clones of other genes that have a high sequence similarity to the nucleic acid molecules of the present invention. Such probes generally will comprise at least 15 bases. Preferably, such probes will have at least 20, at least 25 or at least 30 bases, and may have at least 50 bases. Particularly preferred probes will have at least 30 bases, and will have 50 bases or less, such as 30, 35, 40, 45, or 50 bases.

[0140] For example, the coding region of a nucleic acid molecule of the present invention may be isolated by screening a relevant library using the known DNA sequence to synthesize an oligonucleotide probe. A labeled oligonucleotide having a sequence complementary to that of a gene of the present invention is then used to screen a library of cDNA, genomic DNA or mRNA to determine to which members of the library the probe hybridizes.

[0141] The nucleic acid molecules and polypeptides of the present invention may be employed as reagents and materials for development of treatments of and diagnostics for disease, particularly human disease, as further discussed herein relating to nucleic acid molecule assays, inter alia.

[0142] The nucleic acid molecules of the present invention that are oligonucleotides can be used in the processes herein as described, but preferably for PCR, to determine whether or not the enteroaggregative E. coli, enterotoxigenic E. coli, S. flexneri and/or C. jejuni genes identified herein in whole or in part are present and/or transcribed in infected tissue such as blood. It is recognized that such sequences will also have utility in diagnosis of the stage of infection and type of infection the pathogen has attained. For this and other purposes the arrays comprising at least one of the nucleic acids according to the present invention as described herein, may be used.

[0143] The nucleic acid molecules according to the present invention may be used for the detection of nucleic acid molecules and organisms or samples containing these nucleic adds. Preferably such detection is for diagnosis, more preferable for the diagnosis of a disease related or linked to the present or abundance of enteroaggregative E. coli, enterotoxigenic E. coli, S. flexneri and/or C. jejuni.

[0144] Eukaryotes (herein also “individual(s)”), particularly mammals, and especially humans, infected with enteroaggregative E. coli, enterotoxigenic E. coli, S. flexneri and/or C. jejuni may be identifiable by detecting any of the nucleic acid molecules according to the present invention detected at the DNA level by a variety of techniques. Preferred nucleic add molecules candidates for distinguishing enteroaggregative E. coli, enterotoxigenic E. coli, S. flexneri and/or C. jejuni from other organisms can be obtained.

[0145] The invention provides a process for diagnosing disease, arising from infection with enteroaggregative E. coli, enterotoxigenic E. coli, S. flexneri and/or C. jejune, comprising determining from a sample isolated or derived from an individual an increased level of expression of a nucleic acid molecule having the sequence of a nucleic acid molecule set forth in the Sequence Listing. Expression of nucleic acid molecules can be measured using any one of the methods well known in the art for the quantitation of nucleic acid molecules, such as, for example, PCR, RT-PCR, Rnase protection, Northern blotting, other hybridisation methods and the arrays described herein.

[0146] Isolated as used herein means separated “by the hand of man” from its natural state; i.e., that, if it occurs in nature, it has been changed or removed from its original environment, or both. For example, a naturally occurring nucleic acid molecule or a polypeptide naturally present in a living organism in its natural state is not “isolated,” but the same nucleic acid molecule or polypeptide separated from the coexisting materials of its natural state is “isolated”, as the term is employed herein. As part of or following isolation, such nucleic acid molecules can be joined to other nudeic add molecules, such as DNAs, for mutagenesis, to form fusion proteins, and for propagation or expression in a host, for instance. The isolated nucleic acid molecules, alone or joined to other nucleic acid molecules such as vectors, can be introduced into host cells, in culture or in whole organisms. Introduced into host cells in culture or in whole organisms, such DNAs still would be isolated, as the term is used herein, because they would not be in their naturally occurring form or environment. Similarly, the nucleic acid molecules and polypeptides may occur in a composition, such as a media formulations, solutions for introduction of nucleic add molecules or polypeptides, for example, into cells, compositions or solutions for chemical or enzymatic reactions, for instance, which are not naturally occurring compositions, and, therein remain isolated nucleic acid molecules or polypeptides within the meaning of that term as it is employed herein.

[0147] The nucleic acids according to the present invention may be chemically synthesized. Alternatively, the nucleic acids can be isolated from enteroaggregative E. coli, enterotoxigenic E. coli, S. flexneri and/or C. jejuni by methods known to the one skilled in the art.

[0148] According to another aspect of the present invention, a comprehensive set of novel hyperimmune serum reactive antigens and fragments thereof are provided by using the herein described antigen identification method. In a preferred embodiment of the invention, a hyperimmune serum-reactive antigen comprising an amino acid sequence being encoded by any one of the nucleic acids molecules herein described and fragments thereof are provided. In another preferred embodiment of the invention a novel set of hyperimmune serun-reactive antigens which comprises amino acid sequences selected from a group consisting of the polypeptide sequences as represented in Seq ID No 302-304, 307-309, 314-317, 319, 323-324, 326, 329-330, 333-335, 339-340, 342, 348-349, 352-353, 357-358, 360-364, 366-374, 376-379, 382-384, 386-391, 393-395, 397-399, 403-404, 409-410, 414-418, 421-423, 426-427, 432, 438-442, 445-446, 449, 451-452, 454-461, 463, 465, 467-468, 470-472, 474-600, 997-998, 1000-1007, 1009-1018, 1021-1025, 1027-1033, 1036, 1038-1042, 1044-1068, 1203-1242, 1244-1336, 764, 767-769, 774-776, 778, 782-783, 785-786, 788, 790-791, 795-796, 799-800, 803-806, 808-818, 821-826, 828-829, 831-833, 837, 840-841, 843-845, 847-848, 851-852, 857, 860-863, 866-867, 869-924 and 1365-1393 and fragments thereof are provided. In a further preferred embodiment of the invention hyperimmune serum-reactive antigens, which comprise amino acid sequences selected from a group consisting of the polypeptide sequences as represented in Seq ID No 310-313, 320-321, 327-328, 331-332, 341, 344-347, 350-351, 354-356, 359, 380, 385, 396, 400, 405-407, 412, 424-425, 428-431, 437, 443, 462, 466, 469, 1008, 1020, 1026, 1035, 1043, 770-773, 779-780, 784, 793-794, 797-798, 801-802, 819, 830, 834, 838-839, 842, 849-850, 853-856 and 864 and fragments thereof are provided. In a still preferred embodiment of the invention hyperimmune serum-reactive antigens, which comprise amino acid sequences selected from a group consisting of the polypeptide sequences as represented in Seq ID No 301, 305-306, 318, 322, 325, 336, 338, 343, 365, 375, 381, 392, 401-402, 408, 411, 413, 419-420, 433-436, 444, 447-448, 450, 453, 464, 473, 999, 1019, 1034, 1037, 1243, 763, 765-766, 777, 781, 787, 789, 792, 807, 820, 827, 835-836, 846, 858-859, 865 and 868 and fragments thereof are provided.

[0149] The hyperimmune serum reactive antigens and fragments thereof as provided in the invention include any polypeptide set forth in the Sequence Listing as well as polypeptides whidh have at least 70% identity to a polypeptide set forth in the Sequence Listing, preferably at least 80% or 85% identity to a polypeptide set forth in the Sequence Listing, and more preferably at least 90% similarity (more preferably at least 90% identity) to a polypeptide set forth in the Sequence Listing and still more preferably at least 95%, 96%, 97%, 98%, 99% or 99.5% similarity (still more preferably at least 95%, 96%, 97%, 98%, 99%, or 99.5% identity) to a polypeptide set forth in the Sequence Listing and also include portions of such polypeptides with such portion of the polypeptide generally containing at least 4 amino acids and more preferably at least 8, still more preferably at least 30, still more preferably at least 50 amino acids, such as 4, 8, 10, 20, 30, 35, 40, 45 or 50 amino acids.

[0150] The invention also relates to fragments, analogs, and derivatives of these hyperimmune serum reactive antigens and fragments thereof. The terms “fragment”, “derivative” and “analog” when referring to an antigen whose amino add sequence is set forth in the Sequence Listing, means a polypeptide which retains essentially the same or a similar biological function or activity as such hyperimmune serum reactive antigen and fragment thereof.

[0151] The fragment, derivative or analog of a hyperimmune serum reactive antigen and fragment thereof may be 1) one in which one or more of the amino add residues are substituted with a conserved or non-conserved amino acid residue (preferably a conserved amino acid residue) and such substituted amino acid residue may or may not be one encoded by the genetic code, or 2) one in which one or more of the amino acid residues includes a substituent group, or 3) one in which the mature hyperimmune serum reactive antigen or fragment thereof is fused with another compound, such as a compound to increase the half-life of the hyperimmune serum reactive antigen and fragment thereof (for example, polyethylene glycol), or 4) one in which the additional amino acids are fused to the mature hyperimmune serum reactive antigen or fragment thereof, such as a leader or secretory sequence or a sequence which is employed for purification of the mature hyperimmune serum reactive antigen or fragment thereof or a proprotein sequence. Such fragments, derivatives and analogs are deemed to be within the scope of those skilled in the art from the teachings herein.

[0152] The present invention also relates to antigens of different enteroaggregative E. coli, enterotoxigenic E. coli, S. flexneri and/or C. jejuni isolates. Such homologues may easily be isolated based on the nucleic acid and amino acid sequences disclosed herein. There are multiple serotypes or clinical strains distinguished to date for each of the pathogens and the typing is based on serotype specific antisera or molecular approaches. The presence of any antigen can accordingly be determined for every serotype. In addition, it is possible to determine the variability of a particular antigen in the various serotypes as described for the S. pyogenes sic gene {Hoe, N. et al., 2001}. The contribution of the various serotypes to the different diarrheal infections varies in different age groups and especially geographical regions. It is an important aspect that the most valuable protective antigens need to be conserved among various clinical strains.

[0153] Among the particularly preferred embodiments of the invention in this regard are the hyperimmune serum reactive antigens set forth in the Sequence Listing, variants, analogs, derivatives and fragments thereof, and variants, analogs and derivatives of fragments. Additionally, fusion polypeptides comprising such hyperimmune serum reactive antigens, variants, analogs, derivatives and fragments thereof, and variants, analogs and derivatives of the fragments are also encompassed by the present invention. Such fusion polypeptides and proteins, as well as nucleic add molecules encoding them, can readily be made using standard techniques, including standard recombinant techniques for producing and expression of a recombinant polynucleic add encoding a fusion protein.

[0154] Among preferred variants are those that vary from a reference by conservative amino acid substitutions. Such substitutions are those that substitute a given amino acid in a polypeptide by another amino acid of like characteristics. Typically seen as conservative substitutions are the replacements, one for another, among the aliphatic amino acids Ala, Val, Leu and Ile; interchange of the hydroxyl residues Ser and Thr, exchange of the acidic residues Asp and Glu, substitution between the amide residues Asn and Gln, exchange of the basic residues Lys and Arg and replacements among the aromatic residues Phe and Tyr.

[0155] Further particularly preferred in this regard are variants, analogs, derivatives and fragments, and variants, analogs and derivatives of the fragments, having the amino acid sequence of any polypeptide set forth in the Sequence Listing, in which several, a few, 5 to 10, 1 to 5, 1 to 3, 2, 1 or no amino acid residues are substituted, deleted or added, in any combination Especially preferred among these are silent substitutions, additions and deletions, which do not alter the properties and activities of the polypeptide of the present invention. Also especially preferred in this regard are conservative substitutions. Most highly preferred are polypeptides having an amino acid sequence set forth in the Sequence Listing without substitutions.

[0156] The hyperimmune serum reactive antigens and fragments thereof of the present invention are preferably provided in an isolated form, and preferably are purified to homogeneity.

[0157] Also among preferred embodiments of the present invention are polypeptides comprising fragments of the polypeptides having the amino acid sequence set forth in the Sequence Listing, and fragments of variants and derivatives of the polypeptides set forth in the Sequence Listing.

[0158] In this regard a fragment is a polypeptide having an amino acid sequence that entirely is the same as part but not all of the amino acid sequence of the afore mentioned hyperimmune serum reactive antigen and fragment thereof, and variants or derivative, analogs, fragments thereof Such fragments may be “free-standing”, i.e., not part of or fused to other amino acids or polypeptides, or they may be comprised within a larger polypeptide of which they form a part or region. Also preferred in this aspect of the invention are fragments characterised by structural or functional attributes of the polypeptide of the present invention, i.e. fragments that comprise alpha-helix and alpha-helix forming regions, beta-sheet and beta-sheet forming regions, turn and turn-forming regions, coil and coil-forming regions, hydrophilic regions, hydrophobic regions, alpha amphipathic regions, beta-amphipathic regions, flexible regions, surface-forming regions, substrate binding regions, and high antigenic index regions of the polypeptide of the present invention, and combinations of such fragments. Preferred regions are those that mediate activities of the hyperimmune serum reactive antigens and fragments thereof of the present invention. Most highly preferred in this regard are fragments that have a chemical, biological or other activity of the hyperimmune serum reactive antigen and fragments thereof of the present invention, including those with a similar activity or an improved activity, or with a decreased undesirable activity. Particularly preferred are fragments comprising receptors or domains of enzymes that confer a function essential for viability of enteroaggregative E. coli, enterotoxigenic E. coli, S. flexneri and/or C. jejuni or the ability to cause disease in humans. Further preferred polypeptide fragments are those that comprise or contain antigenic or immunogenic determinants in an animal, especially in a human.

[0159] An antigenic fragment is defined as a fragment of the identified antigen, which is for itself antigenic or may be made antigenic when provided as a hapten. Therefore, also antigens or antigenic fragments showing one or (for longer fragments) only a few amino acid exchanges are enabled with the present invention, provided that the antigenic capacities of such fragments with amino acid exchanges are not severely deteriorated on the exchange(s), i.e., suited for eliciting an appropriate immune response in an individual vaccinated with this antigen and identified by individual antibody preparations from individual sera.

[0160] Preferred examples of such fragments of hyperimmune serum-reactive antigens selected from the group consisting of peptides comprising amino acid sequences of column “predicted immunogenic aa” and “location of identified immunogenic region” of Table 1 to 4 and Table 8, “aa (start-stop)” of Table 6, the serum reactive epitope as defined in Table 7, especially peptides comprising amino add 12-19, 24-29, 37-43, 47-53, 65-72, 83-95, 112-122, 136-147, 162-168, 174-181, 189-195, 201-208, 216-221, 234-243, 270-276, 278-288, 305-316, 318-342, 350-356, 368-400, 420-428, 434-443, 471-477, 481-488, 530-535, 540-547, 566-575, 591-601, 603-609, 624-629 and 192-333 of Seq ID No 301; 9-22, 38-46, 51-61, 66-73, 108-126, 136-154, 162-169, 177-186, 198-204, 231-254, 256-272, 277-295, 297-311, 314-328, 331-338, 379-385, 393-402 and 69-88 of Seq ID No 302; 18-36, 43-53, 80-86, 94-110, 112-118, 152-168, 170-182, 188-198, 200-220, 225-230, 237-243, 248-259, 265-289, 298-317, 325-331, 338-344, 349-360, 382-389, 400-407, 413-419, 433-453, 494-501, 503-524, 530-536, 557-565, 574-582, 586-592, 603-629, 631-637, 643-657, 673-680, 699-705, 715-720, 754, 764-771, 778-793, 800-844, 853-858, 874-893, 899-905, 915-929, 957-965, 134-148, 525-552 and 821-920 of Seq ID No 303; 11-22, 28-34, 40-45, 65-86, 99-107, 115-125, 132-141, 143-150, 158-190, 203-211, 216-239, 246-257, 259-270, 272-279, 286-306, 313-332, 338-364, 369-380, 387-397, 410-418, 422-435, 449-455, 467-510, 515-521, 532-538, 547-563, 251-323 and 368-389 of Seq ID No 304; 7-20, 28-45, 51-66, 81-104, 108-115, 124-137, 149-155, 161-206, 209-214, 222-239, 250-262, 276-282, 309-343, 351-363, 365-386, 405-413, 435-440, 446-454, 458-466, 470-477, 482-492 and 235-269 of Seq ID No 305; 12-43, 51-60, 65-74, 76-86, 102-108, 110-118, 129-139, 146-160, 164-172, 180-192, 195-208, 212-220, 228-250, 252-267, 271-277, 281-288, 296-313, 344-353, 364-379, 381-387, 394-414, 435-443, 451-460, 468-474, 484-491, 500-510, 541-556, 560-586, 604-618, 635-641, 647-657, 668-705, 715-727, 729-734, 740-745, 760-780, 803-809 and 752-825 of Seq ID No 306; 16-23, 66-90, 98-110, 125-131, 144-150, 194-200, 213-219, 221-232, 237-256, 263-281, 293-298, 311-318, 326-337, 339-354, 373-389, 396-402, 404-421, 427-439, 441-448, 452-462, 467-479, 508-530, 534-541, 544-550, 562-569, 575-581, 583-592, 595-628, 636-656, 658-672, 674-680, 687-697, 715-721, 731-736, 739-749, 754-761, 771-788, 790-797, 813-824 and 623-653 of Seq ID No 307; 14-42, 51-57, 66-77, 84-96, 103-111, 129-148, 158-193, 198-208, 212-222, 242-262 and 31-133 of Seq ED No 308; 4-23, 36-62, 65-84, 98-104, 128-135, 144-161, 175-204, 219-240, 250-264, 266-278, 280-290 and 119-152 of Seq ID No 309; 13-26, 33-45, 50-60, 75-81, 97-105, 123-131, 138-145, 158-166, 168-177 and 66-170 of Seq ID No 310; 20-26, 35-50, 52-67, 85-100, 106-149, 189-199, 202-208, 217-226, 236-244, 270-294, 310-332, 340-347, 350-356, 364-373, 375-380, 401-428, 438-445, 477-493, 513-548, 555-564, 568-596, 600-612, 650-665, 667-674, 680-687, 696-707, 715-722, 728-764, 779-784, 795-809, 813-820, 837-843, 858-864, 885-891, 894-900, 907-917, 922-935, 941-946, 970-977, 979-986, 1022-1032 and 881-924 of Seq ID No 311; 13-21, 48-57, 72-83, 105-119, 125-133, 146-153, 170-177, 221-239, 245-274, 283-292, 299-305, 317-329, 335-343, 358-367, 374-380, 399-407, 430-438, 449-454, 473-479, 483-505, 517-527, 531-537, 554-560, 586-599, 601-616, 623-629, 639-647, 649-654, 658-667, 669-676, 690-709, 714-729 and 277-306 of Seq ID No 312; 14-28, 34-40, 45-54, 69-83, 86-100, 116-123, 135-143, 146-161, 168-179, 187-200, 203-225, 237-250, 255-265, 271-292, 298-314 and 104-138 of Seq ID No 313; 4-28, 36-42, 78-85, 106-122, 130-135, 144-150, 161-175, 180-190, 194-200, 226-234, 256-265, 274-294, 309-316, 324-333, 373-379, 382-389, 398-404, 407-416, 422-446, 451-462, 530-541 and 448-483 of Seq ID No 314; 5-50, 53-64, 75-80, 110-116, 119-125, 131-148, 150-156, 192-217, 224-229, 260-267, 275-281, 283-300, 305-310, 323-343, 358-365, 400-406, 422-429, 447-464, 498-503, 512-518, 520-526, 530-537, 552-562, 614-623, 697-703, 705-711, 719-727, 729-743, 745-753, 788-796, 802-810, 813-834 and 377-400 of Seq ID No 315; 4-26, 55-61, 64-70, 74-99, 107-119, 128-134, 137-154, 167-178 and 108-137 of Seq ID No 316; 12-54, 70-76, 117-125, 135-143, 196-202, 205-213, 243-261, 263-269, 278-298, 312-318, 320-326, 334-346, 358-368, 377-389, 396-404, 414-423, 429-438, 448-455, 483-490, 540-549, 557-563, 592-599, 601-609, 622-628, 632-653, 656-692, 695-712, 714-730, 760-766, 775-786, 788-803, 807-814, 820-831, 848-854, 875-886, 892-899, 911-917, 919-925, 927-935, 954-974, 980-992, 1017-1026, 1032-1044, 1074-1079, 1082-1089, 1098-1108, 1115-1120, 1129-1137, 1139-1145, 1161-1170, 1189-1195, 1197-1212, 1219-1225, 1234-1250, 1267-1283, 1302-1318, 1321-1329, 1362-1368, 1377-1388, 1395-1408 and 894-924 of Seq ID No 317; 58-76, 82-87, 95-103, 107-114, 122-136, 139-148, 150-162, 165-172, 184-190, 203-220, 228-238, 245-258, 260-267, 288-295, 299-328, 333-352, 357-386, 424-429 and 2-20 of Seq ID No 318; 5-26, 59-66, 68-74, 81-87, 105-116, 122-132, 144-160, 185-212, 217-223, 228-234, 241-252, 269-274, 291-313, 318-326, 335-342, 352-358, 368-375, 397-404, 411-422, 431-439, 458-472, 474-485, 493-499, 509-519, 521-527, 530-558, 563-579, 590-601 and 554-596 of Seq ID No 319; 6-12, 18-28, 39-45, 69-102, 120-128, 137-147, 164-170, 173-179, 223-230, 236-254, 265-277, 320-326, 350-368, 376-400, 404-416, 441-448, 462-477 and 178-285 of Seq ID No 320; 4-19, 21-47, 52-57, 59-73, 79-86, 88-95, 100-108, 114-129, 136-143, 145-151, 176-182, 235-242, 248-258, 273-281, 301-308, 310-316, 329-340, 347-354, 363-380, 384-400, 407-415, 430-441, 469-480, 491-504, 507-526, 530-540, 547-554, 563-579, 609-617, 620-626, 630-636, 643-655, 665-680, 706-714, 718-725, 729-740, 747-754, 756-779, 790-803, 806-816, 818-824, 829-840, 842-853, 862-877, 901-912, 928-939, 941-952, 961-978, 988-999, 1026-1037, 1067-1078, 1080-1087, 1089-1098, 1104-1115, 1117-1124, 1128-1139, 1143-1151, 1155-1176, 1180-1186, 1205-1211, 1218-1224, 1228-1242, 1244-1251, 1258-1278, 1280-1287, 1290-1298, 1304-1326, 1331-1341, 1363-1378, 1392-1399, 1407-1415, 1430-1443, 1445-1454, 179-265 and 1343-1368 of Seq ID No 321; 4-24, 31-37, 61-75, 83-89, 94-102, 117-123, 130-143, 184-191, 203-210, 212-228, 270-284, 286-292, 301-307, 312-319, 329-335 and 238-319 of Seq ID No 322; 4-16, 22-35, 39-44, 50-59, 65-73, 86-104, 108-117, 128-137, 139-147, 153-159, 165-171, 185-192, 198-223 and 102-120 of Seq ID No 323; 8-16, 23-30, 32-40, 45-50, 61-68, 81-89, 91-114, 121-129, 131-149, 161-185, 191-200, 217-224, 229-249, 253-262, 266-273, 282-289, 297-303 and 265-282 of Seq ID No 324; 10-48, 64-71, 81-88, 100-112, 130-140, 153-170, 177-184, 197-202, 236-250, 266-272, 284-292, 294-300, 306-318, 320-326, 346-357, 379-387, 389-396, 405-416, 424-435, 447-453, 474-483, 501-510, 529-536, 550-568, 582-594, 606-611, 625-631, 633-645, 664-672, 685-692, 703-711, 730-745, 761-775, 782-790, 792-804, 816-825, 827-834, 840-866 and 178-193 of Seq ID No 325; 11-25, 39-57, 69-94, 100-107, 118-155, 158-171, 189-201, 226-233, 236-245, 249-263, 268-277, 287-312, 315-329, 333-342, 351-357, 364-374, 382-388, 399-407, 419-449, 454-471, 486-492, 494-504, 515-541, 547-552, 578-600, 611-623, 625-641, 651-657, 678-692, 699-709, 713-720, 746-752, 772-781, 791-801, 829-844, 880-893, 900-910, 915-923, 936-942, 953-970, 88-167 and 804-839 of Seq ID No 326; 6-16, 1940, 55-61, 67-92, 103-108, 125-142, 154-162, 190-196, 236-247, 257-272, 280-290, 310-320, 331-343, 367-375, and 281-297 of Seq ID No 327; 42-48, 63-116, 151-172, 181-187, 189-196, 200-205, 217-232, 256-261, 288-319, 326-352, 360-374, 380-404, 412-435, 453-466, 474-485, 500-507, 514-519, 525-530, 558-564, 568-582, 590-595, 600-610, 633-640, 666-671, 694-702, 715-722, 730-737, 757-768, 774-785, 820-827, 832-848, 873-878, 883-890, 906-915, 918-930, 937-944, 948-956, 960-966, 970-978, 1023-1040, 1049-1056, 1065-1071, 1085-1090, 1105-1117, 1122-1132, 1165-1171, 1186-1195, 1210-1216, 1309-1342, 1345-1352, 1354-1360, 1375-1385, 1400-1407, 1414-1421, 1430-1439, 1446-1467, 1479-1485, 1522-1530, 1565-1572, 1577-1586, 1596-1608 and 717-741 of Seq ID No 328; 5-11, 17-24, 26-32, 36-43, 50-61, 67-73, 91-102, 111-126, 133-148, 154-161, 167-173, 179-195, 208-223, 230-252, 270-286, 292-306, 308-347, 352-371, 373-380, 386-395, 404-410, 418-431, 436-444, 447-460, 463-477, 486-492, 522-533, 545-553 and 36-133 of Seq ID No 329; 4-23, 68-78, 100-107, 135-149, 152-159 and 1-88 of Seq ID No 330; 5-12, 18-27, 35-55, 68-95, 100-109, 117-122, 129-135, 157-162 and 37-98 of Seq ID No 331; 5-52, 64-80, 86-106, 108-155, 175-190, 223-231, 234-248 and 53-70 of Seq ID No 332; 25-46, 59-64, 69-75, 83-90, 93-100, 107-115, 124-135, 151-177, 183-189, 194-206, 209-215, 219-224, 251-263, 267-276, 305-311, 318-327, 332-338, 350-356, 380-396, 406-412, 414-423, 431-437, 453-461, 463-481, 483-491, 505-510, 513-523, 528-545, 568-575 and 226-275 of Seq ID No 333; 5-29, 37-43, 47-54, 61-70 and 31-65 of Seq ID No 334; 10-35, 42-59, 65-70, 76-85, 92-104, 149-155, 184-191, 234-243, 248-259, 268-277, 383-389, 391-398, 410-430, 445-454, 488-504, 518-523, 530-538, 574-590, 615-623, 627-633, 652-660, 662-670, 674-683, 703-714, 720-728, 731-737, 751-757 and 547-572 of Seq ID No 335; 5-12, 39-51, 57-64, 67-84, 86-108, 124-130, 138-159, 167-179, 181-202, 226-235 and 133-214 of Seq ID No 336; 12-20, 29-40, 57-77, 79-88, 97-103, 111-117, 119-137, 174-200, 202-218, 221-229, 231-238, 240-246, 254-264, 266-280, 296-308, 321-331 and 23-54 of Seq ID No 337, 7-17, 19-54, 66-101, 114-133, 146-182, 193-210, 219-226, 232-238, 244-250, 253-261, 266-279 and 1-31 of Seq ID No 338; 4-11, 17-32, 38-58, 68-111, 113-130, 132-186, 200-212, 219-227, 240-249, 256-265, 270-278, 285-305, 311-317, 328-341, 343-351, 373-386, 389-414, 419-433, 439-504, 510-535, 553-564, 588-594, 599-604, 609-618, 620-631, 635-657, 664-670, 684-703, 705-717 and 661-695 of Seq ID No 339; 5-33, 67-78, 122-129, 141-150, 172-185, 201-209, 217-223, 235-252, 289-295, 303-316, 355-368, 383-389, 398-406, 426-437, 445-451, 459-467, 479-496, 512-517, 523-530, 535-562, 577-584, 590-605, 610-616, 618-632, 644-654, 663-669, 680-688, 70-85 and 271-403 of Seq ID No 340; 4-53, 55-62 and 59-71 of Seq ID No 341; 26-38, 43-63, 67-76, 78-98, 105-112, 115-121, 132-144, 148-153, 179-184, 194-203, 239-245, 261-278, 282-315 and 231-283 of Seq ID No 342; 13-22, 24-30, 49-61, 65-72, 90-97, 99-105, 115-131, 152-160, 165-171, 176-188, 202-221, 231-250, 255-274, 280-286, 288-296, 331-337, 339-347, 350-358, 374-385, 391-408, 418-427, 438-453, 468-476, 482-490, 497-506, 526-532, 534-583, 696-702, 713-719, 730-748, 750-758, 762-776, 802-808, 825-857, 864-950, 963-1004, 1015-1023, 1046-1058 and 571-665 of Seq ID No 343; 5-13, 18-24, 29-45, 51-58, 78-85, 87-94, 109-117, 122-128, 146-161, 175-189 and 1-83 of Seq ID No 344; 5-17, 40-46, 50-65, 73-86, 89-98, 114-139, 151-157, 165-173, 186-195, 197-213, 215-227, 245-260, 310-315, 364-369, 405-415, 428-436, 456-464, 471-482, 507-514, 518-531, 539-565, 648-654, 681-687, 690-707, 720-731, 743-756, 764-771, 801-806, 815-828, 830-836, 204-283 and 287-363 of Seq ID No 345; 6-27, 33-40, 62-78, 83-89, 91-99, 102-109, 115-134, 150-156, 160-170, 172-204, 233-244 and 109-127 of Seq ID No 346; 4-11, 17-25, 31-38, 55-80, 105-113, 115-123, 160-171, 195-201, 210-222, 254-264, 290-296, 301-310, 315-321, 329-334, 349-358, 377-394, 403-409, 424-432, 452-460, 466-474, 480-495, 510-516, 527-539, 554-562, 568-579, 587-592, 599-608, 627-635, 637-646, 661-668, 702-709, 723-736, 744-766, 768-778, 785-802, 815-821, 828-835, 862-868, 876-888, 892-906, 908-918, 921-950, 192-275 and 394-430 of Seq ID No 347; 18-26, 33-78, 80-87, 120-128, 141-182, 184-208, 251-257, 269-300, 305-311 and 208-230 of Seq ID No 348; 11-72, 84-91, 99-109, 112-120, 143-155, 162-183, 188-197, 222-231 and 30-176 of Seq ID No 349; 4-17, 41-56, 61-67, 74-109, 142-149, 158-185, 193-210, 216-236, 241-249 and 84-162 of Seq ID No 350; 845, 135-140, 176-182, 189-196, 206-216, 218-235, 260-269, 272-278, 307-313, 331-344, 352-359, 371-395, 403-414, 416-422, 426-438, 451-470, 478-484, 493-502, 504-511, 514-525, 527-534 and 104-180 of Seq ID No 351; 6-25, 49-59, 65-94, 107-115, 117-124, 135-151, 176-185, 203-209 and 145-173 of Seq ID No 352; 5-15, 46-56, 58-81, 83-111, 118-138, 146-158, 165-175 and 946 of Seq ID No 353; 7-15, 36-43, 54-60, 65-73, 88-94, 107-113, 122-128, 134-141, 162-171, 182-216, 218-235, 249-258, 266-278, 290-301, 308-338, 362-368 and 100-141 of Seq ID No 354; 4-14, 19-24, 27-36, 38-51, 59-73, 90-96, 102-121, 138-150, 157-174, 176-202, 212-225, 229-241, 250-258, 261-268, 279-291, 293-310, 319-338, 358-368, 371-389, 393-398, 404-413, 416-433, 435-442, 458-471 and 327-355 of Seq ID No 355; 10-15, 32-49, 61-69, 97-103, 128-134, 143-154, 164-179 and 99-124 of Seq ID No 356; 6-37, 40-48, 56-68, 108-127, 135-141, 145-163, 170-179, 207-216, 224-234, 238-244, 249-261, 266-283, 352-363, 371-378, 380-392, 447-454, 468-489, 497-503, 505-510 and 434-465 of Seq ID No 357; 6-33, 46-68, 78-84, 120-131, 135-142, 183-188, 201-219, 227-233, 236-244, 246-252, 282-295, 307-315, 335-350, 392-399, 409-414, 427-433, 435-447, 468-482, 487-494, 500-506, 529-537, 543-550, 555-575, 577-584, 606-611, 619-625, 637-651, 682-711, 713-727, 729-738, 756-764, 783-795, 801-815, 817-830, 833-847, 861-890, 898-904, 909-928 and 406-428 of Seq ID No 358; 7-17, 36-53 and 41-65 of Seq ID No 359; 4-10, 17-24, 28-34, 42-49, 55-61, 70-106, 112-127, 135-142, 154-172, 178-184, 187-201, 213-219, 225-230, 235-246, 253-260, 267-302, 318-331, 339-353, 363-373, 376-387 and 258-268 of Seq ID No 360; 8-17, 29-43, 45-52, 58-69, 87-100, 102-111, 148-163, 172-187, 190-208, 210-227, 232-239, 245-253, 258-263, 286-299, 313-334, 346-362, 373-388, 391-411, 425-430, 434-446, 457-489, 496-502, 518-524, 537-546, 555-560, 602-610, 637-646, 676-689, 698-704, 706-742, 750-778, 780-791, 806-842, 864-879, 881-888, 890-899, 901-908, 910-921, 941-947, 953-959, 967-980, 990-995, 1000-1061, 1073-1079, 1081-1092, 1096-1118, 1121-1185, 1195-1209, 1219-1232, 1237-1243, 1250-1274, 1276-1282, 1302-1317, 1324-1333, 1339-1344, 1349-1361, 1370-1376, 1406-1413, 1415-1427, 1433-1450, 1453-1469, 1473-1478, 1482-1495, 1509-1517, 1519-1526 and 611-689 of Seq ID No 361; 7-29, 74-83, 101-107, 115-124, 127-142, 166-184, 209-215, 222-232, 245-252, 255-262 and 40-60 of Seq ID No 362; 4-44, 16-32, 42-47, 65-71, 82-109, 128-145, 158-171, 177-191, 197-228, 230-236 and 138-167 of Seq ID No 363; 4-22, 47-59, 61-71, 76-82, 96-103, 119-146, 165-172, 174-188, 191-202, 214-232, 240-247, 267-273, 278-293, 303-323, 326-340, 348-353, 365-387, 389-398, 405-411, 416-421, 423-451, 453-480, 482-495, 507-512, 518-529, 537-545, 563-570, 581-587, 591-597, 611-624, 626-634, 637-647, 671-692, 694-725, 735-742, 747-768, 786-825, 859-875, 887-894, 897-909, 915-938, 943-954, 967-976, 984-1001, 1006-1015 and 943-1016 of Seq ID No 364; 4-14, 24-34, 47-69, 81-90, 98-112, 144-153, 161-169, 189-196, 202-208, 213-220, 243-249, 256-262, 265-271, 279-285, 299-307, 310-324, 326-345, 356-369, 397-416, 424-429, 432-441 and 361-403 of Seq ID No 365; 4-22, 27-40, 44-54, 77-91, 112-127, 155-161, 196-207, 210-216, 228-234 and 171-210 of Seq ID No 366; 4-9, 14-23, 50-56, 59-68, 77-102, 111-120, 126-152, 161-167, 174-180, 189-202, 204-228, 237-245, 259-266, 278-285, 300-309 and 113-157 of Seq ID No 367; 6-26, 31-37, 41-47, 62-69, 71-93, 106-119, 126-136, 167-180, 196-202, 210-216, 242-254, 258-264, 272-286, 292-298, 300-309, 312-322, 346-352, 354-380, 385-392, 401-420, 434-449, 451-459, 465-473, 497-514, 555-562, 566-574, 604-612, 642-648, 657-669 and 517-643 of Seq ID No 368; 23-35, 71-77, 94-100, 134-140, 157-163, 185-191, 228-237, 255-265, 269-283, 310-315, 334-340, 366-392, 395-400, 404-411, 423-428, 434-445, 451-458, 468-478, 496-508, 512-519, 558-563, 565-582, 11-149 and 507-577 of Seq ID No 369; 14-20, 35-48, 53-63, 71-77, 95-101, 114-121, 123-130, 144-151, 153-160, 162-170, 187-197, 201-211 and 23-52 of Seq ID No 370; 7-17, 24-44, 63-70, 88-99 and 1-78 of Seq ID No 371; 21-39, 46-53, 68-96, 107-113, 118-124, 126-135, 158-185, 196-202, 204-213, 219-226, 246-253, 267-275, 277-285, 299-317, 319-338, 404-410, 421-428, 435-463, 92-170 and 178-199 of Seq ID No 372; 28-43, 47-55, 59-68, 72-79, 106-112, 121-139, 151-160, 168-175, 177-183, 194-212, 223-229, 232-248, 254-263, 270-276, 317-323, 331-338, 342-356, 363-369, 378-391, 415-424, 432-441, 443-456, 464-470, 499-505, 521-527, 534-552, 586-599, 624-634, 639-647, 651-667, 685-690, 694-702, 711-731, 733-744, 752-776, 784-791, 801-807, 837-859, 879-890, 906-914, 918-924, 926-940, 945-958, 965-971, 980-1002, 1010-1016, 1018-1028, 1034-1044, 1046-1053, 1065-1075, 1079-1092, 1095-1104; 1125-1142, 1154-1162, 1176-1181, 1194-1207, 1233-1244, 1252-1261, 1267-1274, 1283-1288, 1318-1324, 1327-1342 and 403-455 of Seq ID No 373; 17-25, 32-77, 82-91, 100-128, 163-169, 189-207, 211-218, 227-232, 239-245, 255-260, 278-300, 311-325, 342-356, 382-390, 393-401, 416-460, 467-487, 491-497, 505-512, 516-532, 551-565, 568-575, 594-601, 610-632, 638-643, 647-670, 672-685, 699-710, 712-726 and 290-399 of Seq ID No 374; 4-39, 56-73, 107-128, 134-142, 144-153, 155-183, 198-203, 205-212, 215-223, 232-244, 248-265, 273-292, 294-301, 304-311, 322-329, 338-343, 369-378, 397-404, 408-416, 420-426, 436-443 and 177-199 of Seq ID No 375; 4-22, 25-31, 35-41, 53-61, 74-83, 101-145, 157-162, 199-216, 247-257, 266-276, 282-289, 291-298, 306-313, 324-335, 345-353, 360-368, 392-400, 404-421, 432-445, 455-462, 478-486, 494-499, 501-511, 525-551, 554-561, 581-588, 600-613, 637-661, 669-676, 684-697, 699-705, 720-730, 746-751 and 393-543 of Seq ID No 376; 11-25, 65-79, 89-97, 106-112, 115-121, 126-132, 134-141, 218-230, 255-260, 287-294, 304-309, 328-334, 339-345, 347-363, 366-382, 421-428, 457-463, 471-477, 484-492, 504-511, 513-518, 547-554, 559-572, 598-604, 617-628, 641-647, 658-665, 691-696, 701-714, 744-751, 760-770, 774-780, 792-801, 805-817 and 635-686 of Seq ID No 377; 5-25, 31-39, 72-79, 93-102, 104-110, 122-132, 138-146, 157-189, 192-198, 205-214, 226-233, 240-248, 269-275, 282-298, 304-310, 313-327, 342-348 and 74-108 of Seq ID No 378; 7-34, 44-50, 54-64, 90-99, 101-106, 111-123, 156-175, 182-212, 224-232, 235-247, 249-264, 266-273, 306-321, 326-333, 343-351, 359-365, 370-403, 424-455, 466-477, 481-495, 503-511, 516-531, 534-543, 555-573, 578-600, 638-650, 657-671, 677-682, 686-692, 698-710, 721-729, 732-741, 752-763, 773-784, 786-809, 816-821, 829-849, 885-894, 911-920, 931-940, 942-949, 954-962, 979-986, 988-995, 1007-1016, 1034-1039, 1060-1065, 1076-1093, 1131-1137, 1144-1152, 1160-1165, 1170-1181, 1186-1196, 1220-1260, 1271-1280, 1287-1295, 1318-1328, 1346-1356, 1361-1367, 1378-1392, 1401-1407, 1412-1420, 1426-1443, 1478-1489, 1491-1499, 1501-1525 and 1352-1387 of Seq ID No 379; 18-53, 64-93, 95-105,124-135, 143-148, 155-161, 163-171, 184-198, 238-245, 258-271, 273-284, 287-292, 302-310, 312-320, 322-341, 349-365, 377-403, 407-414, 417-423, 444-453, 455-469, 471-495, 503-511, 536-557, 579-586, 588-609, 619-626, 632-638, 643-649, 656-663, 669-680, 682-688, 699-714, 729-739, 755-761, 768-776, 781-793, 801-815, 821-826, 833-842, 863-869 and 7-84 of Seq ID No 380; 8-15, 24-40, 51-65, 78-89, 102-111, 117-154, 164-177, 181-192, 198-209, 216-222, 230-237, 241-248, 254-268, 285-293, 298-321, 331-338, 366-373, 379-389, 392-415, 429-439, 441-451, 453-459, 471-486, 489-501, 524-535 and 1-26 of Seq ID No 381; 10-18, 26-38, 48-54, 60-69, 77-83, 88-95, 119-126, 133-169, 172-185, 193-206, 214-225, 236-250, 255-261, 269-275, 278-301, 320-329, 336-341, 345-353, 356-369, 389-397 and 64-88 of Seq ID No 382; 27-32, 37-50, 68-82, 84-108, 134-145, 147-154, 162-170, 172-182, 194-200, 205-224, 232-270, 293-299, 312-328 and 86-134 of Seq ID No 383; 7-13, 18-44, 64-74, 81-86, 94-104, 134-148, 153-159, 174-183, 204-225, 228-243, 248-255, 283-295, 297-303, 320-347 and 100-141 of Seq ID No 384; 4-27, 36-42, 55-62, 64-73, 92-106, 112-118, 120-127, 135-154, 170-179, 242-257, 270-277, 286-325, 335-341, 359-365, 381-387, 410-440, 470-478, 520-528, 543-553, 575-582, 603-612, 617-623, 628-649, 657-663, 685-691, 693-699, 703-708, 712-719, 740-747, 755-763, 766-782, 800-809, 811-833, 835-851, 856-862, 864-876 and 344-369 of Seq ID No 385; 4-10, 15-24, 26-53, 55-71, 78-83, 90-113, 128-148, 156-163, 165-179, 203-213, 228-239, 250-259, 277-285, 292-314, 322-330, 334-340, 345-360, 381-396, 404-409, 416-427 and 204-232 of Seq ID No 386; 4-17, 21-30, 42-49, 56-63, 67-73, 78-87, 92-99, 105-111, 122-130, 151-160, 168-197, 209-226, 243-276, 286-293, 295-301, 306-319, 322-332, 335-342 and 104-126 of Seq ID No 387; 4-10, 12-23, 28-34, 37-60, 65-84, 97-103, 113-127, 135-143, 182-187, 200-223, 227-233, 236-271, 274-279, 282-287, 293-299, 314-329, 334-358 and 300-362 of Seq ID No 388; 20-32, 37-46, 48-65, 75-83, 86-95, 121-133, 138-151, 183-190, 199-205, 216-227 and 1-38 of Seq ID No 389; 9-25, 29-48, 50-100, 102-126, 131-149, 167-173, 210-217, 224-256, 259-270, 275-292, 295-301, 308-313, 319-335, 337-359, 362-382, 393-423, 436-449, 468-476, 481-487, 492-500, 526-534, 537-548, 560-567, 569-579, 590-598, 604-613, 629-636, 644-656 and 506-577 of Seq ID No 390; 25-45, 53-78, 80-102, 116-128, 161-167, 180-186, 193-219, 235-258, 261-268, 291-318 and 214-233 of Seq ID No 391; 4-18, 25-31, 33-39, 47-53, 64-92, 97-106, 123-129, 134-146, 165-171, 173-190, 192-213, 226-239, 251-273, 283-298, 316-324, 339-345, 350-356, 361-376, 400-408, 418-440, 444-451, 476-481, 505-516, 524-542, 555-563, 581-594, 607-629, 634-641, 647-670, 711-719, 728-738, 755-765, 772-780, 800-815, 822-833, 842-852, 860-865, 874-880, 891-913, 926-938, 941-946, 961-978, 984-990, 1013-1024, 1052-1092, 1099-1111, 1120-1140, 1153-1168, 1170-1190, 1193-1211, 1221-1233, 1253-1264, 1268-1274, 1283-1289, 1295-1300, 1303-1327, 1338-1351, 1362-1368, 1391-1396, 1403-1416, 1429-1436, 1471-1477, 1483-1513, 1526-1555, 1585-1591, 1596-1630, 1632-1639 and 299-326 of Seq ID No 392; 10-25, 34-54, 57-67, 77-96, 111-121, 127-139, 151-157, 161-179, 183-198, 201-219, 233-239, 247-252, 268-276, 283-294, 299-309, 319-324 and 156-268 of Seq ID No 393; 6-28, 34-45, 64-79, 88-95, 98-115, 120-141, 159-167, 174-179, 186-192, 198-208, 216-225, 232-246, 248-273, 275-283, 291-299, 304-316, 370-381, 386-393, 401-417, 421-445, 460-468, 470-487, 497-509, 511-535, 542-558, 564-574, 603-609, 619-648, 661-675, 682-694, 720-738, 742-759, 762-788, 793-805, 825-851, 885-893, 898-906, 918-935, 941-953, 971-978, 986-993, 1001-1017, 1019-1026, 1050-1070, 1072-1089, 1097-1102, 1107-1121 and 934-1003 of Seq ID No 394; 6-13, 31-38, 47-60, 71-102, 107-124, 128-155, 173-180, 213-220 and 202-243 of Seq ID No 395; 4-38,49-71, 75-85, 110-115, 168-173, 202-210, 221-228, 240-245, 258-264, 302-316, 348-362, 386-391, 456-462, 474483, -494-499, 511-516, 523-528, 533-539, 549-557, 579-585, 587-593, 618-625, 627-634, 654-660, 664-670, 682-688, 697-702, 729-735, 783-793, 804-812, 817-829, 862-868, 908-920, 954-960, 1000-1006, 1008-1031, 1044-1050, 1069-1077, 1079-1084, 1097-1118, 1139-1146, 1152-1158, 1165-1176, 1181-1186, 1201-1213, 1261-1267, 1272-1280, 1282-1289, 1358-1364, 1373-1382, 1390-1400, 1443-1450, 1497-1505, 1530-1552, 1560-1568, 454-483 and 1142-1349 of Seq ID No 396; 4-13, 20-34, 47-53, 58-65, 76-82, 89-106, 139-160, 165-182, 191-205 and 10-41 of Seq ID No 397; 31-42, 59-75, 91-102, 104-123, 147-153, 172-184, 193-206, 257-266, 306-316, 318-329 and 4-34 of Seq ID No 398; 5-14, 26-35, 38-45, 54-60, 63-79, 121-127, 137-145, 152-162, 167-173, 175-183, 191-202, 218-228, 238-263, 278-295, 303-316, 320-335, 337-345, 359-365, 382-400 and 64-148 of Seq ID No 399; 4-17, 31-39, 46-61, 68-73, 76-97, 128-139, 150-156, 166-172, 174-182, 184-215, 219-225, 238-245, 249-262 and 187-223 of Seq ID No 400; 4-23, 30-41, 44-53, 58-70, 82-91, 107-114, 122-129, 148-155, 201-207, 223-232 and 1-69 of Seq ID No 401; 4-16, 28-41, 44-52, 60-66, 73-82, 92-101, 108-114, 133-138, 145-155, 177-185, 194-202 and 89-130 of Seq ID No 402; 4-9, 21-39, 72-78, 82-88, 99-131, 136-143, 151-162, 164-187, 189-204, 208-216, 223-229, 232-240, 246-256, 269-283, 288-299, 311-321, 328-335 and 209-237 of Seq ID No 403; 4-14, 36-48, 66-73, 75-89, 95-103, 115-123, 128-133, 140-145, 151-158, 165-176, 178-188, 224-254, 267-278, 289-297, 302-311 and 178-262 of Seq ID No 404; 19-25, 55-70, 76-82, 88-107, 114-129, 136-145, 154-177, 205-219, 227-233 and 1-35 of Seq ID No 405; 26-33, 39-45, 50-62, 76-85, 87-101, 116-131, 142-152, 154-186, 193-199, 201-217, 221-243, 266-272, 281-298, 324-330, 335-342, 345-355, 375-383, 407-413, 254-315 and 323-407 of Seq ID No 406; 4-22,27-36, 60-69, 90-98, 107-113, 117-123, 127-134, 137-151, 154-161, 169-178, 185-192, 202-208, 214-223, 230-239, 245-255, 266-275, 307-317, 323-337, 339-353, 361-379, 385-391, 393-401, 415-422, 424-429, 434-442, 444-449, 470-480 and 358-400 of Seq ID No 407; 4-25, 31-42, 83-101, 109-123, 127-136, 139-145, 154-166, 169-182, 194-201, 210-220, 226-237, 251-275, 277-304, 309-329, 341-362, 367-372, 377-393, 400-406 and 223-239 of Seq ID No 408; 4-22, 29-34, 37-44, 48-78, 98-110, 127-142, 144-156, 158-165 and 59-127 of Seq ID No 409; 4-12, 14-20, 27-34, 39-47, 51-67, 69-81, 89-97, 105-119, 121-133, 140-149, 151-161 and 67-105 of Seq ID No 410; 6-19, 25-35, 43-48, 56-69, 73-93, 137-146, 152-161, 164-207, 212-229, 236-241, 244-250, 273-288, 292-299, 314-324 and 259-291 of Seq ID No 411; 17-24, 34-40, 78-85, 227-233, 294-315, 327-335, 345-351, 354-359, 363-368, 388-403, 405-411, 413-419, 425-434, 462-472, 480-500, 528-536, 542-560, 566-573, 579-589, 593-606, 614-646, 651-658, 663-669, 686-726, 734-747, 754-778, 787-806, 809-825, 827-839, 876-887 and 80-214 of Seq ID No 412; 4-9, 15-29, 38-43, 50-81, 83-96, 98-108, 116-122, 136-143 and 133-148 of Seq ID No 413; 5-79, 98-105, 133-146, 158-182, 189-207, 213-225, 231-252, 272-278, 283-303, 312-317, 333-346, 361-367, 370-379, 387-419, 421-433, 439-453, 460-468 and 132-153 of Seq ID No 414; 9-29, 35-40, 49-63, 69-76, 110-134, 141-147, 160-169 and 63-101 of Seq ID No 415; 4-9, 13-20, 25-43, 50-56, 75-86, 102-115, 120-126, 128-135, 139-145, 161-166, 170-189, 202-210, 212-219, 221-232, 240-248, 252-264, 54-161 and 256-285 of Seq ID No 416; 7-17, 19-33, 44-51, 56-70, 74-79, 85-93, 96-102, 110-117, 124-132, 140-148, 157-176, 204-248, 256-269, 289-306, 318-324, 331-339, 377-382, 389-397, 399-411, 413-420, 424-432, 436-441, 462-469, 499-506, 522-547, 549-563, 569-575, 578-594, 609-614, 621-630, 637-646, 652-685, 688-711, 713-724, 739-744, 752-783, 793-799, 811-823, 825-841, 846-855, 861-868, 874-886, 895-907, 935-966, 977-1024, 1026-1035, 1037-1055, 1063-1091, 1094-1103, 1105-1119, 1128-1149, 1160-1173, 1182-1194, 1210-1222, 1227-1234, 1244-1258, 1275-1285, 1293-1300, 1316-1322, 1336-1354, 1357-1364, 1367-1372, 1386-1392, 1403-1411, 1424-1430, 1439-1456, 1458-1469, 1485-1504, 1018-1052 and 1134-1262 of Seq ID No 417; 4-30, 32-42, 59-65, 78-88, 104-127, 132-147, 158-171, 181-187, 195-214, 220-226, 238-269 and 6-90 of Seq ID No 418; 10-16, 25-53, 64-74 and 1-83 of Seq ID No 419; 4-29, 48-57, 75-86, 99-113, 146-155, 164-174, 190-201, 215-234, 236-251 and 101-185 of Seq ID No 420; 4-9, 32-56, 58-67, 71-81, 90-95, 97-105, 112-118, 124-132, 138-144, 147-167, 170-177, 211-217, 231-241, 250-258, 260-272, 274-282, 289-296, 299-309, 319-331, 344-350, 356-362, 368-377, 381-394, 399-406, 412-430, 432-450, 459-473, 486-503, 508-515, 520-548, 564-570, 581-587, 616-623, 628-635, 638-660, 678-684, 691-696, 703-709, 716-723, 760-772, 787-795, 835-844 and 177-207 of Seq ID No 421; 5-43, 46-81, 88-95, 137-142, 163-191, 195-203, 210-235, 241-254, 256-276, 280-288, 292-305, 307-313, 317-333, 335-343, 347-353, 357-363, 372-381, 384-389, 399-409 and 58-179 of Seq ID No 422; 26-32, 38-44, 68-75, 85-100, 104-114, 126-132, 140-150, 153-164, 175-193, 200-209, 218-224, 226-232, 243-249, 251-260, 275-293, 304-329, 335-353, 364-479, 485-490, 500-512, 514-523, 532-556, 577-589, 622-628, 631-653, 656-678, 542-627 and 691-724 of Seq ID No 423; 8-22, 25-30, 46-62, 67-73, 98-103, 105-114, 120-141, 144-153, 168-175, 181-193, 198-204, 208-227, 235-242, 249-258, 281-288, 291-306, 327-336, 340-361, 368-380, 389-409, 417-426, 428-435, 442-453, 468-486, 488-496, 498-509, 511-523, 540-553, 566-579, 587-603, 629-636, 677-682 and 170-207 of Seq ID No 424; 9-25, 41-61, 68-75, 81-102, 106-141, 158-165, 173-191 and 32-53 of Seq ID No 425; 7-26, 28-37, 43-58, 67-79, 92-99, 103-111, 118-128, 130-139, 152-165, 170-186, 192-214, 216-223, 225-251 and 95-122 of Seq ID No 426; 4-16, 21-36, 38-47, 54-64, 92-103, 117-126, 134-155, 157-200, 202-223, 246-262and 70-163 of Seq ID No 427; 30-38, 45-51, 75-90, 93-114, 119-127, 134-143, 151-159, 166-180, 189-207, 217-222, 230-239, 267-276, 283-292, 324-350, 374-386, 392-403, 409-416, 418-424, 451-458, 466-477, 483-494, 501-509, 521-528, 540-549, 556-561, 573-579, 581-588, 621-626, 628-636, 654-661, 695-701, 711-717, 734-743, 751-757, 764-771, 789-798, 832-837, 860-867, 869-883, 911-917, 942-950, 958-964, 966-981, 992-999, 44-131 and 484-615 of Seq ID No 428; 5-14, 27-42, 48-67, 71-83, 85-91, 105-112, 114-135, 139-147, 159-165, 169-185, 188-195, 199-208, 212-221, 231-253, 264-272, 275-282, 290-303, 309-319, 324-331, 340-358, 380-405, 419-425, 438-444, 450-463, 468-477, 497-514, 520-533, 549-556, 568-574, 617-626, 637-643, 661-668, 674-684, 705-713, 718-733, 735-775 and 541-569 of Seq ID No 429; 13-19, 21-32, 45-69, 79-87, 90-109, 140-148, 156-208, 215-232, 243-274, 276-284, 288-298, 301-316, 339-347, 369-384, 405-412, 430-437, 445-457, 464-470, 475-483, 490-509, 517-524, 532-591, 609-628, 647-677, 681-709, 731-740, 752-767, 770-781, 787-793, 798-807, 825-836, 839-869 and 104-137 of Seq ID No 430; 4-10, 33-44, 73-78, 93-101, 123-129, 135-165, 201-214, 251-261, 268-274, 285-292, 316-322, 328-336, 342-350, 353-360, 374-387, 391-399, 401-406, 417-425, 437-443, 447-454, 511-522, 530-535, 727-737, 762-774, 781-787, 803-809, 827-838, 852-859, 877-883, 901-907, 910-918, 951-956, 996-1002, 1071-1079, 1086-1096, 1098-1104, 1106-1119, 1129-1135, 1142-1148, 1155-1161, 1167-1185, 1199-1205, 1224-1232, 1242-1251, 1279-1287, 1293-1299, 1305-1321, 1372-1396, 1426-1435, 1467-1473, 1479-1492, 1526-1533, 1548-1558, 1578-1585 and 1520-1553 of Seq ID No 431; 4-10, 36-45, 56-92, 108-114, 125-133, 137-146, 156-162, 164-186, 194-203, 225-234, 242-251, 272-283, 285-306, 310-315, 322-330, 358-371, 373-379, 389-396 and 95-189 of Seq ID No 432; 4-32, 38-46, 66-83, 88-95, 110-118, 123-141, 169-180, 200-208, 217-225, 237-245, 247-261, 263-272, 275-282, 291-302, 310-338, 345-353, 360-369, 371-378, 386-394, 398-413, 416-422, 437-448 and 51-81 of Seq ID No 433; 4-10, 12-38, 59-64, 81-97, 122-132, 136-142, 149-165, 180-187, 192-199, 205-216, 222-228, 244-251, 255-274, 280-286, 294-320, 327-333, 339-346, 353-359, 372-385, 402-408, 413-420, 433-440, 443-453, 456-461, 464-472, 483-495 and 14-27 of Seq ID No 434; 4-40, 42-56, 59-73, 76-110, 115-128, 132-139, 148-170, 174-195, 197-207, 214-220, 222-236, 238-246, 252-283, 291-326, 334-413 and 239-261 of Seq ID No 435; 4-11, 18-26, 31-47, 59-68, 74-92, 98-144, 149-158, 173-180, 200-210, 216-223, 239-250 and 18-66 of Seq ID No 436; 4-30, 42-52, 59-67, 70-76, 80-86, 138-147, 154-159, 206-217, 26-232, 240-248, 250-257, 259-265, 280-294, 299-326, 328-334, 340-355, 393-398, 415-422, 440-447, 452-458 and 375-452 of Seq ID No 437; 4-12, 20-31, 43-49, 100-118, 121-138, 141-148, 153-161, 167-177, 206-213, 225-231, 235-240, 256-267, 277-287, 301-322, 325-333, 336-360, 381-388, 400-415, 447-452, 459-472 and 55-75 of Seq ID No 438; 4-10, 29-56, 93-99, 119-124, 133-140, 159-171, 187-195, 200-214, 221-232, 249-255, 263-271, 285-291, 310-316 and 61-198 of Seq ID No 439; 9-15, 48-65, 72-79, 87-102, 104-115, 118-124, 126-138, 153-185, 188-207, 212-239, 257-265, 297-304, 306-313 and 1-54 of Seq ID No 440; 18-38, 48-62, 68-107, 143-158, 167-181, 193-198, 205-213, 220-231, 239-245, 258-264, 279-300, 308-314, 318-328, 343-354, 360-367, 425-433, 465-474, 496-505, 508-514, 529-536, 545-562, 572-580, 587-593, 595-609, 612-618, 627-637, 642-649, 652-673, 688-693, 696-701, 707-736, 748-754, 766-776, 779-786, 791-797, 815-825, 830-842, 857-865, 868-876, 880-887, 898-905, 911-923, 925-936, 961-983, 1011-1018, 1043-1059, 1073-1079, 1093-1104, 1110-1116, 1135-1144, 1146-1163, 1183-1189, 1196-1204, 1222-1242, 1250-1262, 1275-1296, 1322-1330 and 1056-1199 of Seq ID No 441; 15-27, 35-40, 47-55, 57-73, 77-93, 103-112, 126-138, 141-179, 192-218, 224-237, 244-257, 263-278 and 83-115 of Seq ID No 442; 4-22, 24-29, 36-43, 63-75, 90-96, 118-128, 137-145, 168-182, 198-210, 212-221, 242-250, 289-316, 318-323, 327-339, 381-387, 401-411, 424-434, 443-449, 453-465, 485-498, 500-508, 510-515, 521-528, 538-545, 554-560, 574-606, 619-627, 645-658, 681-688, 70-79 and 473-516 of Seq ID No 443; 8-18, 45-50, 52-62, 76-82, 84-107, 109-116, 130-137, 141-150, 152-158, 164-170, 175-186, 188-196 and 9-73 of Seq ID No 444; 4-24, 39-46, 84-95, 133-151, 166-174, 179-189, 196-203, 212-218, 223-236, 240-246, 255-261, 266-275, 286-293, 299-316, 323-331, 347-358, 368-380, 382-389, 391-398, 410-417, 420-429, 437-445, 451-456, 464-471, 504-514, 523-532, 539-545, 553-567, 572-588, 594-603, 620-630, 636-641, 656-663, 665-672, 676-687, 693-700, 40-166 and 577-605 of Seq ID No 445; 442, 48-59, 74-90, 92-119, 121-149, 163-180, 185-192, 199-209 and 1-9 of Seq ID No 446; 5-26, 60-76, 104-114, 119-128, 136-141, 156-167, 186-198, 218-237, 260-267, 275-290, 328-335 and 294-334 of Seq ID No 447; 4-10, 14-37, 40-47, 68-77, 87-95, 103-111, 116-153, 170-237, 245-251, 253-274, 280-299, 311-318, 321-338, 364-371, 378-392, 395-430, 438-451, 458-475, 479-507, 520-526, 542-560, 573-586, 591-598, 608-614, 636-668, 678-690, 692-698, 702-717, 724-731 and 302-448 of Seq ID No 448; 5-17, 23-48, 60-73, 75-82, 98-108, 110-128, 146-160, 168-180, 191-213, 229-237, 240-252, 269-277, 305-313 and 63-147 of Seq ID No 449; 4-10, 19-35, 41-47, 51-60, 70-80, 91-115, 170-191, 194-211, 226-232, 234-241, 256-273, 289-294, 311-349, 358-363, 392-400, 406-416 and 356-391 of Seq ID No 450; 5-25, 50-57, 67-75, 78-86, 94-112, 122-145, 152-165, 171-183, 193-199, 217-235, 238-253, 255-264, 281-287, 294-303, 309-314, 319-324, 327-341, 349-355, 364-382, 384-392, 397-411, 419-427, 435-452, 455-463, 488-504, 536-541, 558-563, 568-574, 595-601, 614-620, 637-644 and 7-127 of Seq ID No 451; 10-16, 39-45, 62-91, 102-114, 120-127, 136-147, 152-159, 163-173, 178-188, 196-217, 223-231, 234-254, 257-267, 270-283, 290-300, 306-312 and 224-295 of Seq ID No 452; 4-9, 12-21, 23-52, 54-65, 74-83, 103-117, 131-141, 144-163, 171-177, 183-189, 205-212, 252-262, 297-304, 308-314, 320-329, 343-349, 357-370, 375-380, 395-405, 434-441, 456-465, 474-484, 505-514, 528-536, 540-549, 576-582, 597-607, 616-622, 634-641, 648-654, 690-713, 715-724, 743-751, 757-763, 772-789, 791-802, 809-814, 828-837, 840-846, 853-875 and 283-379 of Seq ID No 453; 4-27, 40-46, 55-62, 84-100, 108-114, 118-123, 132-145, 165-171, 178-183, 192-223, 226-232, 234-243, 276-282, 299-305, 326-334, 340-351, 357-371, 374-387, 395-406, 417-437, 443-452, 470-478, 485-494, 496-503, 508-521, 527-537, 541-546 and 252-272 of Seq ID No 454; 4-36, 45-50, 58-63, 69-80, 89-97, 99-109, 111-118, 126-132, 141-147, 172-184, 188-197, 208-215, 220-231, 236-241, 253-264, 271-280, 288-297, 342-347, 361-367, 375-382, 388-394, 401-406, 408-414, 441-447, 452-458, 466-476, 483-491, 503-510, 521-528, 539-545, 547-558, 566-576, 584-589, 606-617, 624-636 and 418-432 of Seq ID No 455; 7-14, 5-32, 6-72, 95-100, 108-114, 123-135, 143-153, 203-221, 224-230, 260-269, 290-297, 302-308, 320-328, 333-339 and 149-248 of Seq ID No 456; 21-27, 30-48, 55-65, 70-90, 97-107, 122-128, 135-166, 172-180, 184-199, 205-224, 237-247, 252-269, 278-283 and 240-257 of Seq ID No 457; 4-14, 20-33, 36-43, 49-60, 72-114, 117-123, 125-132, 138-143, 157-175, 184-204, 208-217 and 58-89 of Seq ID No 458; 4-15, 23-36, 38-47, 54-64, 92-103, 117-126, 135-155, 157-200, 202-223, 231-239, 246-261 and 70-162 of Seq ID No 459; 4-10, 35-45, 56-92, 108-114, 127-146, 160-186, 194-203, 225-234, 242-251, 272-283, 285-306, 310-315, 322-330, 358-371, 373-382, 389-396 and 93-188 of Seq ID No 460; 18-32, 35-82, 85-115, 119-142, 149-172 and 4-36 of Seq ID No 461; 6-14, 20-28, 35-55, 64-87, 100-109, 144-149, 189-208, 210-218, 221-227, 242-247, 254-264, 283-297, 301-308, 310-322, 351-358, 372-378, 383-389, 421-432, 447-460, 537-545, 550-558, 581-593, 595-606, 645-658, 677-688 and 414-503 of Seq ID No 462; 9-34, 47-63 and 37-51 of Seq ID No 463; 6-22, 50-58, 73-101, 119-128, 139-154, 167-173, 209-217, 227-234 and 1-126 of Seq ID No 464; 10-34, 37-44, 72-78, 87-100, 111-117, 122-143, 177-196, 207-229, 232-249, 255-261, 268-278, 289-300, 315-349, 351-358, 371-378, 386-394, 404-466, 468-480 and 341-443 of Seq ID No 465; 16-22, 30-35, 45-52, 54-64, 74-84, 90-98, 120-125, 135-148, 156-162, 166-186, 190-199, 201-215, 226-232, 262-270, 281-289, 322-331, 335-340, 367-372, 379-385, 415-426, 438-445, 455-466, 472-479, 492-497 and 341-484 of Seq ID No 466; 4-31, 33-66, 77-83, 90-101, 118-135, 161-166, 168-189, 203-209, 216-222, 231-236, 269-277, 279-290, 298-310, 341-347, 371-376, 380-387, 389-395, 410-419, 446-455, 465-471, 476-484, 513-522, 532-537, 545-556, 560-585, 603-610, 630-657, 660-672, 694-704, 717-728, 738-745, 754-766, 782-792, 794-811, 813-819, 833-853, 901-906, 912-917, 951-979, 985-991, 998-1004, 1013-1019, 1052-1065, 1080-1086, 1124-1130, 1142-1150, 1168-1176, 1182-1193, 1209-1218, 1234-1245, 1271-1277, 1284-1298, 1301-1308, 1339-1345 and 529-629 of Seq ID No 467; 21-28, 57-71 and 1546 of Seq ID No 468; 63-99, 101-109, 111-137, 143-172, 175-200 and 11-48 of Seq ID No 469; 18-32, 35-82, 85-115, 119-142, 149-172 and 6-39 of Seq ID No 470; 67-74, 88-94, 112-118, 127-138, 155-169, 171-180, 183-190, 196-205, 243-249, 260-271, 308-344, 346-373, 381-414, 416-457, 473-513, 515-524, 528-535, 539-544, 556-566, 572-580, 585-590 and 26-129 of Seq ID No 471; 17-40, 47-66, 70-78 and 29-102 of Seq ID No 472; 4-9, 23-41, 44-51, 58-64, 70-86, 94-111 and 47-77 of Seq ID No 473; 4-22, 29-48, 50-58, 62-69, 71-78 and 6-35 of Seq ID No 474; 8-19, 31-47, 49-58, 64-79, 84-96 and 7-52 of Seq ID No 475; 4-17, 19-26, 41-49, 63-87, 92-99, 113-131 and 9-118 of Seq ID No 476; 10-37, 55-68, 71-78, 92-98, 115-122, 131-138, 149-158, 163-170, 172-189, 212-219, 239-257, 259-271, 289-302, 304-320, 322-340, 359-366, 373-384, 400-412, 444-453, 460-474, 485-527 and 186-224 of Seq ID No 477; 6-13 of Seq ID No 478; 5-12 of Seq ID No 480; 6-14 of Seq ID No 481; 4-10 of Seq ID No 483; 4-19 of Seq ID No 486; 9-14 of Seq ID No 487; 4-44, 47-60, 65-72, 92-98 and 61-95 of Seq ID No 488; 2-17 of Seq ID No 489; 19-29, 39-45, 52-59 and 7-32 of Seq ID No 490; 6-20, 36-44 and 78-97 of Seq ID No 491; 5-12 and 1-22 of Seq ID No 492; 17-24, 2641, 50-55 and 8-32 of Seq ID No 493; 7-18 and 13-22 of Seq ID No 494; 24-32 and 3-28 of Seq ID No 495; 6-11, 14-35, 40-56 and 17-35 of Seq ID No 496; 4-12, 17-23, 42-53, 69-81 and 45-64 of Seq ID No 497; 4-25, 28-34, 37-43, 59-69, 104-114 and 52-117 of Seq ID No 498; 4-12 and 4-22 of Seq ID No 499; 4-9 and 1-19 of Seq ID No 500; 4-22 and 2-19 of Seq ID No 501; 13-36, 48-63, 80-101, 141-149, 165-176, 184-198 and 28-54 of Seq ID No 502; 4-14, 21-26 and 21-29 of Seq ID No 503; 4-26 and 20-36 of Seq ID No 504; 4-13 and 7-22 of Seq ID No 505; 7-13, 21-34 and 26-54 of Seq ID No 506; 4-21, 25-44, 59-68 and 1-92 of Seq ID No 507; 4-14, 26-33 and 12-33 of Seq ID No 508; 12-31, 46-60, 87-94 and 1-98 of Seq ID No 509; 5-14 and 4-22 of Seq ID No 510; 6-15, 34-52 and 14-36 of Seq ID No 511; 5-18, 27-33, 40-48 and 17-39 of Seq ID No 512; 8-17, 63-70, 89-100 and 21-52 of Seq ID No 513; 4-18, 21-31, 51-68 and 34-66 of Seq ID No 514; 4-9, 14-19 and 3-31 of Seq ID No 515; 4-10, 21-30, 37-51 and 11-44 of Seq ID No 516; 4-9, 32-38 and 7-22 of Seq ID No 517; 4-22, 29-36, 38-47 and 12-43 of Seq ID No 518; 4-12, 14-23 and 26-37 of Seq ID No 519; 4-11, 20-46 and 32-59 of Seq ID No 520; 4-10 and 1-30 of Seq ID No 521; 4-28, 32-50 and 17-51 of Seq ID No 522; 14-28 and 2-14 of Seq ID No 523; 4-25 and 12-40 of Seq ID No 524; 33-41, 43-53 and 16-39 of Seq ID No 525; 9-16 and 7-18 of Seq ID No 526; 4-11, 24-31 and 18-34 of Seq ID No 527; 14-20, 48-56, 62-69, 81-87 and 456 of Seq ID No 528; 8-16 and 13-39 of Seq ID No 529; 11-16, 26-40, 50-63 and 6-48 of Seq ID No 530; 23-34, 59-72 and 1-28 of Seq ID No 531; 11-16, 26-82, 95-101, 103-113, 120-164, 179-185, 187-194, 224-248, 255-263, 276-293, 296-301, 304-312, 314-320, 351-374, 390-398, 401-407, 420-426, 434-444, 454-475, 481-508, 521-531, 535-549 and 46-77 of Seq ID No 532; 6-30, 32-53, 69-76, 78-86, 96-112, 121-135, 142-175, 177-199, 201-255, 263-269, 277-288, 290-303, 307-345, 353-364, 388-403, 443-455, 462-474, 480-485 and 6-30 of Seq ID No 533; 12-61 and 14-46 of Seq ID No 534; 4-12, 24-33, 39-51, 57-63, 78-87 and 26-51 of Seq ID No 535; 8-15, 29-40, 48-54 and 33-56 of Seq ID No 536; 22-31, 59-69 and 70-100 of Seq ID No 537; 12-61 and 12-43 of Seq ID No 538; 4-16, 28-39, 62-71, 85-97 and 54-85 of Seq ID No 539; 10-20, 23-31, 35-42, 48-62 and 30-53 of Seq ID No 540; 9-41, 46-52, 70-85 and 63-89 of Seq ID No 541; 18-34, 36-46, 71-83, 95-101, 130-143, 149-161 and 96-115 of Seq ID No 542; 4-18, 26-66, 68-95, 100-110, 120-135, 143-165, 168-175, 177-198 and 160-176 of Seq ID No 543; 4-16, 21-34, 51-56 and 10-29 of Seq ID No 544; 4-23, 29-37, 40-70, 78-91, 98-111 and 89-115 of Seq ID No 545; 4-34, 56-62 and 36-54 of Seq ID No 546; 4-9 and 1-29 of Seq ID No 547; 10-22, 24-37, 52-57, 74-81 and 16-69 of Seq ID No 548; 4-16, 42-70, 78-93, 95-101, 103-111 and 64-88 of Seq ID No 549; 4-9, 22-48, 51-59, 64-94, 100-124, 130-135 and 123-134 of Seq ID No 550; 10-20, 27-40, 48-57 and 15-58 of Seq ID No 551; 24-37 and 12-30 of Seq ID No 552; 30-42, 51-56, 67-76, 79-96 and 22-61 of Seq ID No 553; 11-22, 28-35 and 18-33 of Seq ID No 554; 4-9, 13-21, 37-42 and 23-36 of Seq ID No 555; 4-12 and 12-22 of Seq ID No 556; 39-50, 71-89, 95-106, 126-139, 154-162 and 58-143 of Seq ID No 557; 5-26, 38-46, 54-62, 69-81, 87-99, 103-117, 120-136, 138-161, 168-189, 201-207 and 136-167 of Seq ID No 558; 4-21, 33-39, 41-55, 61-68, 73-98, 104-110, 121-127, 131-156 and 97-115 of Seq ID No 559; 9-26, 36-48 and 21-40 of Seq ID No 560; 4-12, 26-32 and 12-24 of Seq ID No 561; 4-12, 17-23, 39-62 and 8-34 of Seq ID No 562; 17-41, 47-66 and 12-30 of Seq ID No 563; 4-11, 15-25, 33-52 and 1-27 of Seq ID No 564; 4-11, 33-40, 48-76, 96-104 and 84-106 of Seq ID No 565; 15-22 and 11-26 of Seq ID No 566; 8-19, 44-53, 61-71, 78-85, 97-107 and 49-89 of Seq ID No 567; 13-23, 31-44, 59-66, 84-90, 96-110 and 47-147 of Seq ID No 568; 4-24, 56-73, 83-97, 112-132, 140-150, 161-184 and 111-146 of Seq ID No 569; 4-17, 19-26, 41-48, 63-87, 92-99, 113-131 and 10-136 of Seq ID No 570; 4-11, 17-26 and 6-32 of Seq ID No 571; 26-38, 48-55, 72-86, 90-107, 123-132, 134-161, 181-187 and 3-19 of Seq ID No 572; 4-19, 26-35 and 11-46 of Seq ID No 573; 5-10, 21-38, 42-70, 84-103 and 92-127 of Seq ID No 574; 6-17, 34-40, 42-51, 75-85, 94-100 and 38-63 of Seq ID No 575; 6-13, 21-27, 29-35, 57-64 and 32-63 of Seq ID No 576; 4-19, 22-48, 54-62, 73-91, 94-109 and 75-98 of Seq ID No 577; 9-25 and 12-28 of Seq ID No 578; 16-21 and 8-25 of Seq ID No 579; 4-24, 26-32, 45-55, 58-67, 76-93, 104-111, 117-122, 128-136 and 33-119 of Seq ID No 580; -11, 31-37, 56-63, 66-84 and 32-58 of Seq ID No 581; 6-69, 75-87, 89-111, 149-156 and 52-139 of Seq ID No 582; 4-13, 19-29, 49-68 and 24-49of Seq ID No 583; 19-25, 27-33, 43-84, 86-92, 111-118, 125-136, 138-147 and 95-124 of Seq ID No 584; 20-29, 50-56, 63-85, 89-98, 110-128 and 2-29 of Seq ID No 585; 4-11, 41-47, 62-71 and 7-34 of Seq ID No 586; 23-30, 48-57, 67-72, 81-89 and 11-31 of Seq ID No 587; 14-27, 50-62 and 22-57 of Seq ID No 588; 4-17, 23-37 and 13-33 of Seq ID No 589; 5-33, 38-57, 60-68 and 18-37 of Seq ID No 590; 4-19, 44-51 and 24-45 of Seq ID No 591; 17-40, 47-66, 70-78 and 67-101 of Seq ID No 592; 4-20, 24-29, 43-55, 57-63, 74-83, 137-157, 171-179, 181-192, 237-243, 273-279, 300-310, 312-321, 324-330, 366-380, 401-417 and 61-120 of Seq ID No 593; 6-21 and 17-43 of Seq ID No 594; 11-17 and 9-31 of Seq ID No 595; 18-28, 38-44, 53-59, 64-74, 78-85 and 10-96 of Seq ID No 596; 12-40, 49-58 and 5-49 of Seq ID No 597; 28-34, 46-52, 54-68, 72-85, 95-104 and 66-94 of Seq ID No 598; 4-14 and 1-25 of Seq ID No 599; 418, 30-37, 51-65, 83-89, 99-105, 108-136 and 24-98 of Seq ID No 600; 26-34, 36-44, 68-78, 85-92, 96-101, 127-134, 141-148, 156-166, 186-192, 244-256, 281-287, 291-301, 308-316, 321-343, 368-382, 385-391, 394-404, 414-429, 453-465, 471-489 and 147-240 of Seq ID No 997; 10-18, 26-48, 58-68, 72-78, 94-105, 115-130, 155-164, 170-177, 179-185, 201-219, 243-260, 267-277, 295-302, 350-376, 398-403, 429-437, 451-462, 471-478, 504-512, 563-568, 570-583, 589-594, 614-629, 1-123 and 161-546 of Seq ID No 998; 10-20, 35-45, 59-93, 163-168, 190-196, 200-210, 233-261, 270-279, 306-329, 331-353, 363-381, 388-394, 399-425, 443-460, 462-474, 477-498, 506-516, 522-542, 546-559, 570-577, 100-301 and 446-518 of Seq ID No 999; 4-13, 28-34, 52-71, 78-90, 118-140, 147-156, 167-187, 264-275, 286-292, 305-310, 328-334, 340-346, 351-362, 31-117 and 165-354 of Seq ID No 1000; 38-45, 76-84, 91-103, 111-118, 147-162, 166-177, 187-201, 208-215, 242-249, 267-274, 295-301, 309-322, 18-100 and 111-296 of Seq ID No 1001; 4-9, 25-39, 41-47, 70-78, 82-103, 106-140, 152-188, 192-198, 200-207, 211-217, 232-251, 271-277, 285-299, 307-314, 323-335, 344-370, 376-382, 388-398, 417-422, 428-446, 448-456, 462-468, 494-504, 526-533, 565-573, 199-383 and 454-579 of Seq ID No 1002; 10-27, 50-87, 94-109, 115-128, 134-152, 155-169, 175-193, 196-213, 216-233, 235-251, 259-270, 272-283, 293-303, 311-318, 327-339, 348-374, 380-386, 392-402, 421-426, 432-450, 452-460, 466-472, 498-508, 530-537 and 206-363 of Seq ID No 1003; 9-16, 25-31, 48-86, 90-101, 109-127, 131-147, 150-187, 189-195, 204-211, 213-226, 237-248, 250-261, 271-281, 289-296, 305-317, 326-352, 358-364, 370-380, 399-404, 410-428, 430-438, 444-450, 476-486, 508-515, 547-555, 1-118, 208-283 and 494-564 of Seq ID No 1004; 31-37, 57-66, 73-97, 99-117, 119-137, 141-149, 157-172, 179-185, 190-196, 203-212, 216-224, 226-238, 240-251, 261-271, 279-286, 295-307, 316-342, 348-354, 360-370, 389-394, 400-418, 420-428, 434-440, 466-476, 498-505, 537-545, 1-98, 233-351 and 423-538 of Seq ID No 1005; 27-37, 44-58, 66-80 and 5-70 of Seq ID No 1006; 4-32, 35-69, 92-98, 113-137, 168-190, 224-235, 269-277, 279-289, 322-329, 370-376, 380-387, 389-395, 411-420, 442-457, 463-473, 476-487, 510-521, 531-554, 561-567, 570-585, 604-610, 612-624, 632-651, 660-672, 690-702, 718-730, 738-745, 782-809, 813-820, 823-829, 844-854, 901-906, 911-917, 959-967, 985-991, 997-1006, 1010-1019, 1036-1045, 1053-1059, 1079-1086, 1124-1132, 1137-1150, 1168-1180, 1182-1193, 1209-1214, 1216-1226, 1231-1245, 1271-1277, 1290-1298, 1301-1307, 1339-1345, 22-86, 138-260 and 490-641 of Seq ID No 1007; 37-43, 50-57, 65-82, 86-109, 123-129, 141-150, 152-157, 166-172, 179-203, 209-241, 249-296, 298-307, 312-326, 329-335, 341-348, 364-377, 379-399, 401-409, 411-417, 420-425, 438-444, 461-466, 473-480, 497-505, 522-534, 541-550, 586-597, 608-614, 622-632, 660-666, 679-694, 697-706, 708-731, 737-772, 784-789, 810-825, 837-873, 882-895, 901-928 and 214-233 of Seq ID No 1008; 10-16, 18-27, 41-61, 81-90, 133-142 and 43-118 of Seq ID No 1009; 21-47, 50-69, 83-89, 113-120, 129-146, 152-158, 160-189, 204-225, 235-249, 251-263, 265-275 and 107-140 of Seq ID No 1010; 7-12, 16-24, 28-46, 61-68, 79-85, 87-93, 95-102, 108-123, 148-164, 166-172, 177-202, 205-215, 231-246, 254-261, 267-273, 280-294, 309-315, 322-329, 337-342, 345-351, 386-394, 406-413, 449-455, 473-480, 490-497, 501-508, 532-539, 576-583, 623-629, 657-665, 681-708, 715-722, 751-757 and 584-613 of Seq ID No 1011; 10-26, 52-88, 94-109, 115-172, 175-189, 196-210, 215-232, 244-252, 260-270, 272-283, 293-303, 311-318, 327-339, 348-374, 380-386, 392-402, 421-426, 432-450, 452-460, 466-472, 498-508, 530-537, 569-577 and 258-365 of Seq ID No 1012; 2546, 59-65, 68-75, 83-90, 93-100, 107-115, 124-135, 151-177, 183-189, 194-206, 209-215, 219-224, 251-263, 267-276, 305-311, 318-327, 332-338, 350-356, 380-396, 406-412, 414-423, 431-437, 453-461, 463-481, 483-491, 505-510, 513-523, 528-545, 568-575 and 245-271 of Seq ID No 1013; 4-19, 21-29, 61-68, 87-95, 103-113, 145-154, 157-170 and 10-76 of Seq ID No 1014; 4-18, 28-36, 41-65, 69-84, 96-103, 106-115, 118-124, 126-132, 148-156, 169-181, 187-194, 221-227 and 1-63 of Seq ID No 1015; 5-33, 67-78, 122-129, 141-150, 172-185, 201-209, 217-223, 235-252, 303-316, 355-368, 383-389, 400-406, 411-420, 426-437, 445-451, 459-467, 479-496, 512-517, 523-530, 535-562, 577-584, 590-605, 610-632, 644-654, 663-669, 680-686 and 309-334 of Seq ID No 1016; 31-38, 73-84, 97-121, 124-135, 141-146, 156-170, 174-191, 205-210 and 85-153 of Seq ID No 1017; 24-30, 49-69, 71-111, 113-127, 133-145, 153-169, 172-203, 220-236, 247-254, 256-267, 277-287, 295-302, 311-323, 332-345, 348-358, 364-370, 376-386, 405-410, 416-434, 436-444, 450-456, 482-492, 514-521, 548-561 and 243-286 of Seq ID No 1018; 4-10, 22-31, 39-53, 85-94, 102-110, 130-137, 143-149, 154-161, 174-179, 184-190, 197-203, 206-212, 220-227, 240-248, 251-265, 267-286, 297-310, 338-357, 365-370, 373-382 and 260-345 of Seq ID No 1019; 9-48, 54-71, 84-92, 114-145, 160-188, 190-200, 216-236, 243-255, 261-268, 281-304, 315-322, 330-336, 342-351, 370-380, 383-393, 400-408, 412-420, 436-442, 452-459, 473-480, 501-512, 518-525, 532-541 and 1-94 of Seq ID No 1020; 50-59, 66-81, 90-126, 129-185, 187-205, 213-219, 228-240, 254-266, 268-279, 289-299, 307-314, 323-335, 344-370, 376-382, 388-398, 417-422, 428-446, 448-456, 462-468, 494-504, 526-533, 565-573 and 275-374 of Seq ID No 1021; 5-14, 61-74, 91-99, 110-116, 119-136, 138-149, 159-169, 188-194, 205-227, 236-244, 249-256, 294-305, 321-342, 350-364, 373-378, 385-392, 404-420, 422-430, 462-470, 491-500, 513-520, 583-591, 617-638, 652-663, 674-680, 684-698, 709-718, 745-753, 757-763, 781-788, 835-841, 844-854, 861-869, 882-890, 898-916, 934-940, 946-952, 979-990 and 443-534 of Seq ID No 1022; 23-35, 71-77, 94-100, 134-140, 157-163, 188-212, 214-221, 262-272, 287-293, 323-331, 360-372, 374-380, 402-411, 421-429, 438-443, 462-473, 477-486, 523-528, 530-547, 57-155 and 324-404 of Seq ID No 1023; 11-36, 43-59, 62-70, 78-90, 159-165, 176-188, 197-202, 206-213, 220-225, 234-251, 258-275, 286-293, 300-311, 329-337, 352-361, 363-369, 383-396, 399-417, 420-432, 451-466, 472-478, 504-526, 546-552, 558-566, 576-583, 591-609, 621-628, 642-650, 657-663, 676-681, 692-706, 713-724, 734-753, 763-778, 787-807, 819-825, 57-82 and 445-461 of Seq ID No 1024; 14-26, 38-46, 50-57, 76-87, 89-104, 107-112, 123-134, 136-142, 148-162, 173-194, 200-206, 208-216, 226-233, 243-256, 264-307, 338-343, 351-359, 366-376 and 133-157 of Seq ID No 1025; 13-19, 30-37, 46-60, 75-82, 100-105, 109-115, 134-140, 146-161, 186-192, 199-205, 207-215, 223-230, 254-260, 281-289, 297-311, 344-352 and 251-352 of Seq ID No 1026; 5-16, 19-24, 43-54, 56-89, 104-122, 126-139, 144-157, 165-202, 232-244, 252-265, 272-277, 281-287, 289-300, 308-320, 344-355, 364-390, 396-402, 408-418, 437-442, 448-466, 468-476, 482-488, 514-524, 546-553, 585-593, 284-400 and 486-600 of Seq ID No 1027; 21-27, 29-46, 50-58, 60-70, 76-98, 100-110, 116-122, 124-130, 145-166, 170-188, 199-209, 214-221, 229-236, 244-259, 270-305, 308-314, 319-329, 348-355, 376-383, 396-442, 446-456, 461-466, 479-485, 513-524, 528-533, 539-546, 556-563, 574-585, 595-602, 604-616, 618-625, 630-647, 649-656, 662-674, 680-686, 689-700, 716-739 and 586-630 of Seq ID No 1028; 4-19, 31-49, 82-88, 92-98, 111-141, 146-153, 161-172, 174-197, 199-214, 218-226, 233-239, 242-250, 256-266, 279-293, 298-309, 321-331, 338-345 and 223-248 of Seq ID No 1029; 24-41, 54-61, 63-77, 83-91, 100-111, 116-121, 128-133, 139-146, 153-164, 166-176, 212-242, 255-266, 269-275, 277-285, 290-299 and 144-277 of Seq ID No 1030; 4-29, 33-47, 93-109, 117-125, 152-168, 175-180, 213-219, 224-234, 261-267, 270-284, 321-326, 328-342, 359-365, 383-389, 401-407, 417-424, 471-478, 491-497, 532-537, 545-555, 569-583, 646-652, 688-694, 711-718, 735-745, 794-803, 813-823, 834-839, 851-857, 860-867, 874-882, 895-900, 902-910, 917-923, 933-940, 948-955, 960-966, 1001-1007, 1045-1053, 1058-1066, 1087-1101, 1103-1114, 1130-1139, 1141-1149, 1155-1166, 1192-1198, 1211-1219 and 549-657 of Seq ID No 1031; 13-48, 57-63, 73-81, 89-103, 107-114, 119-125, 130-140, 146-167, 175-186, 202-210, 212-220, 233-239, 255-270, 272-286, 288-301 and 10-23 of Seq ID No 1032; 5-41, 48-56, 75-81, 86-93, 100-111, 126-134, 150-156, 168-188, 209-236, 250-257, 260-274, 291-305, 311-335, 337-344, 373-379, 393-406, 423-450, 461-467 and 105-135 of Seq ID No 1033; 8-16, 37-88, 105-117, 141-169, 172-178, 189-197, 210-217, 243-249, 253-260, 269-282, 293-299, 315-332, 363-373, 378401, 406-415, 417-423, 454-460, 465-471, 503-510, 515-521, 538-576, 578-616, 619-625, 636-643, 651-669, 671-686, 691-698, 719-726, 734-748, 762-778, 782-795, 799-810, 821-845, 894-908, 917-925, 937-943, 946-967, 969-975 and 444-479 of Seq ID No 1034; 31-45, 47-55, 68-82, 87-100, 103-108, 112-117, 134-140, 157-163, 166-175, 178-185, 197-206, 213-219, 234-244, 265-272, 280-289, 292-305, 312-317, 322-328, 335-344, 349-356, 361-372, 376-383, 399-421, 426-444, 455-475, 490-495 and 1-84 of Seq ID No 1035; 4-10, 43-53, 64-100, 116-123, 135-141, 145-154, 164-194, 202-211, 233-242, 250-259, 280-291, 293-314, 318-323, 330-338, 366-379, 381-387, 397-404 and 70-188 of Seq ID No 1036; 4-13, 20-28, 33-49, 61-70, 76-94, 100-146, 151-163, 175-182, 202-212, 218-225, 241-252 and 12-53 of Seq ID No 1037; 12-46, 49-64, 81-97, 103-108, 119-140, 150-173, 179-193, 196-213, 215-223, 225-235, 238-253, 259-264, 267-274, 278-284, 292-305, 314-321, 340-346 and 26-49 of Seq ID No 1038; 18-23, 28-50, 100-150, 157-186, 197-203, 219-231, 233-240, 257-280 and 10-45 of Seq ID No 1039; 10-16, 29-49, 59-73, 79-118, 154-169, 178-192, 204-209, 216-224, 231-242, 250-256, 269-275, 290-311, 319-325, 329-339, 354-365, 371-378, 436-444, 476-485, 507-516, 519-525, 540-547, 556-573, 583-591, 598-604, 606-620, 623-629, 638-648, 653-660, 663-684, 699-704, 707-712, 718-747, 759-765, 777-787, 790-797, 802-808, 826-836, 841-853, 868-876, 879-887, 891-898, 909-916, 922-934, 936-947, 972-994, 1022-1029, 1054-1070, 1084-1090, 1104-1115, 1121-1127, 1146-1155, 1157-1174, 1194-1200, 1207-1215, 1233-1253, 1261-1273, 1286-1307, 1333-1341 and 1054-1156 of Seq ID No 1040; 14-26, 28-37, 40-49, 58-78, 89-95, 107-118, 125-132, 135-142, 155-161, 175-185, 195-213, 215-225, 233-241, 248-254, 263-271, 294-323, 334-340, 345-351, 355-368, 371-394, 401-410, 419-424, 449-456, 463-469, 483-496 and 113-187 of Seq ID No 1041; 10-35, 52-116, 133-143, 149-170, 176-184 and 94-134 of Seq ID No 1042; 4-10, 13-19, 31-39, 57-72, 92-103, 109-122, 126-144, 168-174, 179-192, 234-245, 257-262, 36-62, 157-180 and 190-270 of Seq ID No 1043; 4-29, 36-52, 60-68, 70-90 and 5-73 of Seq ID No 1044; 5-12, 22-56, 58-63, 69-82, 140-146, 175-180, 204-212, 240-248, 276-283, 307-312, 324-329, 335-353, 372-385, 403-412, 436-443, 448-464, 468-474, 476-483, 503-514, 566-573, 590-597, 601-611, 619-626, 630-639, 647-655, 666-679, 689-697, 707-719, 721-728, 761-769, 783-789, 797-803, 806-812, 845-853, 864-870, 893-904, 917-923, 949-956, 967-985, 1005-1021, 1027 1034, 1059-1065 and 1-335 of Seq ID No 1045; 4-16, 18-28, 48-55, 67-75, 81-87, 94-100, 108-124, 139-147, 150-156 and 110-136 of Seq ID No 1046; 4-22, 28-37, 39-46 and 28-38 of Seq ID No 1047; 4-10, 13-19, 27-34, 40-103, 106-113 and 79-100 of Seq ID No 1048; 11-23 of Seq ID No 1049; 4-10, 19-25, 45-51, 64-75, 79-89 and 73-96 of Seq ID No 1050; 4-22, 29-36, 38-47 and 21-44 of Seq ID No 1051; 8-20, 39-44 and 26-42 of Seq ID No 1052; 8-19, 31-47, 49-58, 64-79, 84-96 and 16-50 of Seq ID No 1053; 20-26, 31-37 and 4-13 of Seq ID No 1054; 4-10, 16-32, 34-42, 60-66 and 7-25 of Seq ID No 1055; 4-9, 23-45 and 8-44 of Seq ID No 1056; 4-19, 34-40, 53-81, 103-117, 122-187 and 22-51 of Seq ID No 1057; 4-24 and 1-30 of Seq ID No 1058; 2-27 of Seq ID No 1059; 4-18 and 9-44 of Seq ID No 1060; 4-17, 19-26, 41-49, 63-87, 92-99, 113-131 and 6-105 of Seq ID No 1061; 6-12 and 9-32 of Seq ID No 1062; 4-44, 49-62 and 22-65 of Seq ID No 1063; 20-28, 34-40 and 1-14 of Seq ID No 1064; 4-29, 35-57 and 17-43 of Seq ID No 1065; 14-29 and 24-35 of Seq ID No 1066; 4-19, 31-47, 62-73, 76-83, 87-93, 99-106 and 10-38 of Seq ID No 1067; 4-10, 12-26 and 1-28 of Seq ID No 1068; 16-30, 38-45, 55-61, 69-75, 131-141, 159-165, 169-179, 182-191, 206-214, 230-245, 252-262, 272-280, 299-305, 328-339, 362-370, 372-378, 388-393, 401-409 and 148-226 of Seq ID No 1203; 13-18, 24-33, 36-49, 69-79, 93-101, 113-119, 129-136, 139-164, 167-175, 182-193, 195-217, 224-231, 282-293, 336-345, 351-358, 373-378, 382-387, 407-415, 441-447, 451-459, 461-470, 479-485, 499-526, 533-544, 559-569, 572-581, 583-592, 598-609, 613-624, 632-649, 654-660, 666-694, 700-706, 712-722, 738-752, 771-778, 800-816, 824-839, 847-864, 879-885, 918-925, 927-946, 957-967, 971-999, 1006-1014, 1018-1037, 1046-1055, 1057-1071, 1090-1098, 1104-1113, 1115-1128, 1181-1187, 1193-1202, 1205-1211, 1223-1234, 1240-1248, 1259-1265, 1273-1281, 1289-1301, 1336-1343, 1346-1352, 1356-1363, 1365-1378, 1382-1391, 1401-1408, 1416-1423, 1433-1443, 1450-1455, 1461-1467, 1475-1481, 1486-1493, 1-14 and 1115-1214 of Seq ID No 1204; 6-11, 31-53, 69-84, 86-93, 102-108, 112-121, 135-145, 157-177, 185-202, 208-226, 232-241, 244-251, 260-289, 306-316 and 199-267 of Seq ID No 1205; 4-25, 36-41, 44-49, 68-78, 83-89, 95-102, 113-124, 137-142, 163-175, 179-185, 209-218, 233-244, 250-261, 279-288, 308-322, 330-336 and 49-119 of Seq ID No 1206; 4-24, 42-50, 57-75, 101-107, 109-131, 153-161, 180-190, 214-223, 226-240, 248-265, 197-220 and 252-267 of Seq ID No 1207; 4-24, 56-62, 111-117, 125-130, 138-143, 153-167, 169-175, 195-204, 207-217, 234-250, 284-298, 303-308, 314-326, 351-356, 359-371 and 15-111 of Seq ID No 1208; 431,58-64, 74-80, 88-94, 116-127, 131-138, 141-149, 1-63 and 105-163 of Seq ID No 1209; 4-9, 15-26, 33-40, 57-68, 91-108, 112-124, 132-152, 158-168, 186-213, 228-236, 253-269, 276-283 and 203-222 of Seq ID No 1210; 4-18, 31-48, 50-61, 81-88, 103-110, 114-121, 143-152, 154-164, 176-194, 199-210, 217-225, 234-240, 245-254, 264-279 and 138-153 of Seq ID No 1211; 4-20, 35-41, 51-61, 76-88, 107-115, 122-128 and 13-108 of Seq ID No 1212; 4-18, 25-31, 41-46, 61-70, 79-85, 126-133, 135-141, 166-172, 175-181, 191-199, 208-217, 250-258, 261-273, 312-320, 370-376, 385-394, 401-409, 411-416, 431-445, 457-478, 531-543, 560-567, 575-593, 607-615, 625-633, 679-689, 733-740, 746-752, 157-219 and 432-508 of Seq ID No 1213; 4-28, 47-53, 58-64, 88-97, 124-129, 136-141, 146-167, 174-184, 187-193, 195-203, 205-220, 231-237 and 64-92 of Seq ID No 1214; 7-39, 44-56, 60-65, 83-99, 117-132, 142-148, 162-179, 185-203, 213-231, 239-245, 248-259, 288-295, 330-335, 370-381, 391-396, 401-407, 443-462, 472-492, 505-512, 521-530, 549-557, 562-577, 647-653, 660-666, 673-680, 695-703, 710-717, 729-734, 745-751, 756-766, 769-778, 787-794, 812-819, 825-834, 55-76 and 667-736 of Seq ID No 1215; 5-11, 21-27, 48-56, 64-73, 75-85, 110-117, 124-130, 132-138, 145-163, 165-171, 186-198, 231-239, 246-254, 265-270, 289-296, 312-322 and 100-124 of Seq ID No 1216; 16-24, 26-63, 66-77, 91-97, 100-111, 148-169, 182-188, 205-212, 223-230, 235-244, 264-272, 291-297, 305-312 and 252-296 of Seq ID No 1217; 4-17, 19-31, 34-44, 47-59, 87-93, 99-105, 113-119, 124-137, 139-146, 150-163, 165-175, 185-191, 197-214, 222-227, 235-246, 257-270, 274-279 and 85-152 of Seq ID No 1218; 4-20, 40-52, 74-81, 110-117, 123-138, 144-150, 163-181, 185-195, 199-232, 234-248, 269-277, 280-286, 301-314, 324-329 and 33-55 of Seq ID No 1219; 4-19, 33-55, 67-74, 78-84, 91-105, 109-117, 132-138, 167-176, 190-196, 202-207, 210-217 and 151-162 of Seq ID No 1220; 4-14, 20-26, 28-37, 77-84, 89-94, 114-123, 174-180, 200-208, 222-239, 241-251, 263-271, 276-282, 291-302, 330-335, 374-390, 392-400, 432-441, 447-454, 462-467, 487-501, 516-526, 530-537, 550-566 and 77-110 of Seq ID No 1221; 16-23, 25-31, 42-48, 57-75, 81-95, 108-118, 124-151, 153-170, 178-185, 190-201, 216-222, 230-260, 290-297, 300-307, 312-318, 326-334, 348-363, 365-385 and 89-142 of Seq ID No 1222; 41-50, 52-70, 80-91, 123-131, 136-143, 146-158, 167-178, 207-213, 228-235, 242-264, 274-288, 302-307, 335-347, 349-355 and 59-203 of Seq ID No 1223; 5-14, 21-31, 42-71, 76-103, 111-119, 123-132, 138-144, 167-188, 194-200, 205-212, 230-246, 253-260, 263-269, 275-294, 300-319, 330-343, 349-354 and 335-347 of Seq ID No 1224; 6-14, 18-57, 67-81, 87-97, 104-109, 115-122, 125-139, 147-156, 178-188, 193-199, 211-216, 221-235, 265-287, 293-300, 312-323, 330-352, 369-379, 385-390, 392-404, 408-420, 437-457, 471-483, 489-494, 501-509, 525-535, 547-554 and 410-444 of Seq ID No 1225; 4-18, 55-82, 87-100, 105-117, 145-150, 168-175, 183-189, 198-203, 228-235, 247-256, 277-283, 293-301, 308-321, 337-362, 373-379, 392-397, 427-434, 457-463, 502-510, 539-552, 560-566, 615-629, 99-226 and 566-643 of Seq ID No 1226; 4-27, 59-75, 83-88, 95-105, 112-120, 128-144, 164-169, 200-205, 220-226, 237-242, 253-259, 264-270, 1-103 and 124-232 of Seq ID No 1227; 12-42, 69-77, 103-109, 120-128, 149-157, 161-166, 179-197, 201-218, 238-248, 253-261, 266-272, 278-286, 307-314, 138-216 and 272-287 of Seq ID No 1228; 4-26, 28-43, 50-56, 62-67, 103-109, 121-130, 155-163, 173-179, 197-202, 208-215, 221-233, 258-267, 296-305, 308-314, 321-328, 41-91 and 179-200 of Seq ID No 1229; 4-15, 23-32, 48-55, 61-67, 86-98, 102-111, 124-130, 137-157, 166-171, 178-186, 193-200, 218-232, 236-241, 246-264, 274-288, 291-310, 338-346, 348-359, 389-395, 402-414, 416-428, 430-443, 445-451, 455-469, 473-484, 489-499, 501-509, 511-525, 534-542, 556-561, 579-593, 601-621, 625-637 and 475-513 of Seq ID No 1230; 23-30, 33-50, 53-59, 106-114, 126-132, 140-146, 171-180, 196-204, 224-240, 242-254, 262-272, 274-282, 288-296, 326-332, 341-352, 378-387, 394-407, 412-418, 431-464, 489-496 and 88-176 of Seq ID No 1231; 4-35, 43-52, 60-79, 93-100, 120-139, 146-154, 157-171, 208-226, 234-247, 265-271, 273-283, 292-298, 309-323, 330-339, 355-382, 396-409, 445-453, 455-465, 484-505, 512-525, 528-535, 547-576, 584-594 and 488-559 of Seq ID No 1232; 5-28, 34-41, 47-54, 79-100, 112-117, 122-127, 130-139 and 43-96 of Seq ID No 1233; 4-23, 25-38, 45-50, 68-77, 105-113, 149-156, 177-188, 197-208, 222-229 and 84-145 of Seq ID No 1234; 11-16, 19-32, 37-43, 62-69, 72-80, 82-93, 97-128, 133-142, 156-166, 179-193, 199-205, 209-216, 239-256, 269-278, 295-325, 332-349, 369-379, 6-26 and 347-362 of Seq ID No 1235; 4-10, 17-28, 39-48, 67-82, 93-100, 122-128, 144-153, 177-184, 196-208, 263-285, 289-295, 297-310, 353-359, 367-377, 389-409, 413-421, 426-433, 436-442, 445-451, 453-459, 468-475, 477-488, 506-526, 544-554, 562-611, 639-650, 678-692, 697-706, 718-724, 733-744, 746-754, 766-782, 789-796, 808-822, 831-43, 847-856, 861-868, 887-902, 931-937, 939-951, 957-964, 970-976, 997-1003, 1017-1024, 1033-1039, 1048-1054, 1060-1066, 1075-1083, 1092-1130, 1136-1152, 1168-1176, 1210-1221, 1228-1238, 1242-1247 and 934-1001 of Seq ID No 1236; 73-86, 88-95, 113-118, 166-178, 223-230, 243-280 and 202-216 of Seq ID No 1237; 16-22, 40-46, 51-62, 77-83, 93-106, 116-124, 127-138, 151-158, 162-177, 185-207, 211-220, 223-234, 261-269, 271-280, 309-317, 339-350 and 50-127 of Seq ID No 1238; 11-26, 36-42, 74-85, 88-101, 106-121, 137-156, 186-198, 203-224, 226-254, 295-308, 311-318, 327-355, 373-385, 417-443, 445-464 and 95-163 of Seq ID No 1239; 5-11, 16-23, 34-43, 48-56, 71-83, 89-96, 101-110, 138-162, 164-180, 189-195, 204-214, 222-227, 229-250, 255-261, 272-278 and 19-90 of Seq ID No 1240; 13-19, 26-53, 67-73, 76-82, 87-102, 112-121, 123-148, 151-156, 162-170, 175-186, 199-209, 211-217, 230-244, 251-287, 300-305, 368-374, 403-415, 418-424 and 339-446 of Seq ID No 1241; 4-19, 22-30, 59-73, 84-92, 97-117, 128-140, 165-173, 224-234, 245-255, 276-284, 302-309, 323-330, 349-355, 364-376, 380-385, 391-402, 404-415, 424-432, 437-446, 449-477, 484-499, 516-526, 537-544, 550-555, 562-568, 573-601, 616-623, 653-663, 681-718, 720-728, 762-771, 779-799, 801-806, 814-820, 827-835, 851-870, 899-906, 950-957, 973-990, 995-1005, 1036-1052, 1071-1077, 1086-1098, 1147-1152, 1167-1194 and 866-789 of Seq ID No 1242; 27-55, 57-64, 66-75, 135-142, 172-178, 191-197, 229-235, 241-246 and 184-217 of Seq ID No 1243; 4-24, 33-39, 55-83, 91-114, 126-132, 137-159, 164-189, 202-224, 232-238, 241-253, 259-282, 285-308, 310-335, 359-364, 371-388 and 113-128 of Seq ID No 1244; 6-28, 54-59, 103-114, 122-130, 145-153, 167-175, 184-190, 193-204, 207-212, 215-223, 282-289, 291-300, 315-321, 327-339, 347-354 and 10-103 of Seq ID No 1245; 14-37, 52-57, 73-85, 96-113, 124-136, 142-148, 150-157, 166-172, 182-194, 199-215, 217-224 and 64-160 of Seq ID No 1246; 4-18, 20-33, 59-77, 93-100, 120-129, 131-137, 140-146, 148-158, 166-172, 185-191, 243-249, 253-258, 295-307, 327-333, 345-370, 387-394, 425-432, 483-489, 491-501, 521-527, 538-553, 560-570, 576-582, 629-637, 649-658 and 406-431 of Seq ID No 1247; 9-17, 34-39, 41-59, 71-84, 86-98, 148-169, 177-187, 194-203, 207-214, 222-228, 235-258, 265-273, 286-296, 300-307, 316-328, 338-361, 367-375, 394-401, 407-418, 425-434, 480-495, 502-522, 544-560, 568-575, 584-592, 600-622, 636-641, 661-667, 669-690, 700-707, 719-731, 733-739, 745-750, 767-776, 784-791, 795-811, 840-846, 853-866, 664-745 and 793-856 of Seq ID No 1248; 19-54, 86-91, 98-105, 109-124, 126-136, 145-150, 173-178, 196-204, 212-224, 229-239, 246-252, 279-299, 307-313, 323-329, 337-345, 349-361, 382-393, 399-406, 416-421 and 404-429 of Seq ID No 1249; 20-26, 66-71, 84-97, 105-111, 122-137, 145-165, 170-185, 204-210, 230-242 and 64-158 of Seq ID No 1250; 4-16, 28-69, 72-85, 87-99, 101-123, 128-136, 140-159, 161-173, 185-205, 207-220, 227-240, 242-252, 274-280, 290-296, 301-326, 356-379, 399-453, 461-473, 485-498, 501-525, 527-574 and 117-132 of Seq ID No 1251; 4-11, 37-52, 56-64, 71-82, 89-96, 108-116, 122-137, 144-162, 165-182, 184-194, 228-237, 252-267, 289-296, 473-487, 489-503, 511-516, 527-545, 553-570, 584-593, 604-611, 629-638, 640-649, 684-696 and 536-549 of Seq ID No 1252; 21-37, 81-97, 119-127, 130-143, 158-163, 175-180, 219-230, 245-256, 265-273, 293-299, 319-327, 425-434, 472-485, 493-498, 508-513, 552-557, 562-570, 574-580, 588-594, 597-604, 631-636, 640-646, 667-680, 699-718, 725-747 and 168-235 of Seq ID No 1253; 4-11, 19-29, 51-56, 65-73, 85-98, 109-121, 125-135, 145-161, 171-177, 204-219, 223-228, 252-258, 262-268, 286-313, 315-325, 327-332, 345-352, 395-410, 429-435, 443-451, 455-463, 465-475, 481-487, 516-522, 549-562, 585-591, 598-605, 607-614, 643-651, 673-682, 690-696, 700-705, 725-734, 738-744, 758-765, 769-779, 781-792, 830-844, 847-853 and 700-722 of Seq ID No 1254; 1040, 68-91, 95-104, 140-152, 158-170, 185-191, 196-201, 205-219, 240-246, 249-256, 262-268, 274-280, 293-313, 315-320, 326-332, 338-358, 402-453, 457-466, 476-516 and 31-94 of Seq ID No 1255; 10-34, 41-47, 50-66, 73-92, 100-107, 121-127, 133-139, 146-155, 159-175, 184-191, 223-230, 238-247, 273-286, 300-310, 328-336, 352-358, 365-372, 376-409, 415-423, 446-452, 459-465, 471-484, 509-522, 532-540, 543-554, 586-598, 600-610, 617-632, 670-689, 695-706, 711-727, 741-746, 752-760, 772-835, 843-882, 890-933, 958-973, 991-1022, 1024-1048, 1053-1070 and 277-365 of Seq ID No 1256; 4-31, 56-70, 77-96, 112-117, 124-137, 139-155, 160-169, 176-193, 228-234, 237-257, 271-288, 317-322, 337-371, 373-391 and 317-353 of Seq ID No 1257; 4-14, 20-28, 30-52, 54-62, 76-84, 94-100, 125-132, 140-181, 185-191, 208-222 and 181-199 of Seq ID No 1258; 9-46, 53-59, 74-80, 82-93, 97-103, 111-117, 130-142, 152-161, 188-197, 236-251, 264-271, 285-295, 307-340, 343-394, 397-412, 416-436, 440-472, 497-527, 540-548, 561-566, 573-583, 591-598, 607-616, 624-631, 639-649, 669-675, 683-689, 694-718, 728-736, 756-771, 782-803, 814-829, 831-871, 873-879, 882-897, 900-912, 920-928, 940-953, 963-998 and 243-318 of Seq ID No 1259; 5-16, 24-30, 34-39, 45-51, 59-72, 80-86, 100-108, 116-123, 133-140, 148-162, 176-181, 184-211, 219-228, 233-242, 257-278, 300-310, 320-338, 340-345, 352-360 and 226-320 of Seq ID No 1260; 5-12, 51-58, 61-74, 95-112, 124-137, 153-158, 163-189, 192-204, 209-236, 240-250, 255-273, 304-317, 320-326, 334-348, 350-356, 360-378, 384-416, 439-457, 465-470, 488-493, 496-505, 531-541, 548-557, 579-587, 593-601, 616-647, 649-659, 679-685, 693-702, 705-713, 715-734, 737-743, 751-758, 763-779, 781-788, 791-801, 856-862, 882-896, 903-914 and 38-55 of Seq ID No 1261; 8-34, 51-57, 68-76, 79-95, 110-116, 127-140, 142-154, 162-172, 174-202, 214-220, 228-239, 292-306, 314-320, 322-329, 337-344, 356-371, 374-380, 382-393, 416-421, 424-433, 444-453, 461-468, 470-478, 485-490, 497-503, 511-519, 537-543, 555-564, 566-579, 588-594, 603-609, 615-627, 63-640, 647-659, 663-689, 699-710, 728-735, 739-748, 750-756, 764-769, 776-788, 418-441 and 511-591 of Seq ID No 1262; 12-19, 21-30, 32-39, 43-49, 55-68, 76-87, 97-104, 114-123, 130-141, 153-168, 179-205, 207-216, 218-226 and 223-239 of Seq ID No 1263; 8-34, 72-121, 128-141, 153-172, 174-216, 221-256, 261-294, 307-315, 332-349, 354-370, 372-435, 452-457, 461-477, 487-492, 503-509, 511-520, 537-549, 559-565, 568-582, 584-591, 593-602, 607-617, 625-638, 655-674, 681-687, 696-703 and 254-268 of Seq ID No 1264; 4-13, 23-40, 79-98, 106-124, 126-149, 154-161, 163-176, 178-187, 199-226, 232-254, 256-276, 297-304, 308-326, 329-338, 364-373, 384-399, 404-432, 439-499, 502-518, 523-544, 557-568, 571-582, 584-590, 603-617, 621-627, 633-639, 641-651, 653-663, 675-684, 686-699, 705-729, 736-781 and 522-597 of Seq ID No 1265; 5-45, 49-62, 85-99, 114-122, 136-148, 151-171, 198-211, 253-260, 278-287, 297-303, 309-314, 318-324, 326-336, 348-363 and 1-115 of Seq ID No 1266; 5-13, 22-33, 88-95, 132-144, 160-166, 189-202, 210-223, 253-258, 269-282, 286-294, 83-98 and 244-269 of Seq ID No 1267; 18-25, 29-38, 72-95, 97-107, 110-139, 144-152, 155-161, 174-182, 198-203 and 44-56 of Seq ID No 1268; 5-14, 17-23, 29-50, 52-64, 72-98, 109-115, 120-135, 137-145, 152-158, 167-175, 178-185, 210-234, 241-255, 258-271, 276-281, 290-303, 307-312 and 10-34 of Seq ID No 1269;5-32, 50-56, 62-70, 78-84, 97-121, 132-171, 177-182, 188-195, 204-214, 241-250, 267-274, 276-281, 292-309, 311-320, 333-344, 349-361, 375-395, 398-405 and 383-400 of Seq ID No 1270; 4-10, 16-26, 59-80, 82-93, 97-115, 117-131, 148-160, 169-182, 184-210, 217-234, 241-254, 256-263, 265-276, 306-312, 344-350, 384-395, 400-409, 416-423, 428-440, 449-465, 496-504, 517-555, 335-360 and 427-541 of Seq ID No 1271; 4-20, 48-91, 96-115, 134-142, 171-187, 197-217, 222-242, 246-255, 264-270, 277-289, 305-320, 338-352, 354-373 and 21-130 of Seq ID No 1272; 6-23, 25-53, 61-76, 83-92, 107-121, 147-166, 186-201, 207-215, 243-251, 264-274, 282-326, 333-348, 357-366, 371-380, 401-423, 432-465, 471-477, 481-490, 500-506, 512-525, 540-560, 583-603, 605-612, 615-626, 647-656, 661-681, 687-693, 713-722 and 587-614 of Seq ID No 1273; 4-9, 15-21, 28-35, 39-54, 59-73, 76 86, 92-108, 120-134, 136-142, 145-161, 209-217, 220-228, 236-249, 258-267, 275-282, 293-304, 306-327, 330-340, 346-352, 354-360, 368-383, 386-392, 401-413 and 97-175 of Seq ID No 1274; 4-11, 20-30, 47-66, 72-97, 108-117, 119-129, 142-163, 211-219, 224-237, 243-249, 251-263, 270-288, 295-305, 311-316, 326-333, 341-346, 367-375 and 301-378 of Seq ID No 1275; 22-30, 38-45, 62-68, 78-90, 96-103, 107-114, 118-127, 134-148, 150-173, 179-193, 195-200, 205-219, 221-234, 239-248, 250-280, 282-296, 308-325, 334-351, 363-389, 425-432, 438-443, 468-481, 488-495, 499-517, 570-593, 602-610, 613-621, 629-637 and 536-559 of Seq ID No 1276; 12-23, 26-35, 51-63, 72-78, 86-91, 135-140, 183-190, 201-209, 211-219, 241-247, 260-266, 272-281, 295-301, 329-335, 339-345, 355-366, 387-402, 428-445, 453-459, 503-517, 519-527, 531-538, 546-553, 560-569, 3-131 and 232-331 of Seq ID No 1277; 8-13, 25-35, 51-56, 72-78, 86-91, 135-140, 183-190, 201-209, 211-219, 241-247, 260-265, 272-281, 295-301, 329-335, 339-345, 355-366, 387-402, 428-445, 453-459, 503-512, 519-529, 531-538, 546-553, 560-569, 1-145, 160-183, 212-334 and 376400 of Seq ID No 1278; 5-17, 62-71, 73-116, 118-131, 137-144, 151-158, 160 167, 169-175, 181-190, 193-210, 212-222, 231-262, 273-280, 300-329, 341-358, 363-368, 394-400, 403-409, 416-427, 450-437, 464-470, 478-484, 499-511, 513-529, 544-554, 558-565, 573-589, 597-604 and 335-348 of Seq ID No 1279; 4-18, 38-46, 52-60, 65-79, 93-115, 123-131, 144-154, 168-183, 191-196, 201-223, 225-236, 250-263, 273-278, 289-317, 328-338, 357-373, 384-399 and 159-248 of Seq ID No 1280; 11-39, 43-52, 57-69, 72-98, 112-142, 147-154, 159-165, 167-178, 198-210, 213-227, 244-250, 257-266, 268-286, 295-301, 305-311, 318-338, 340-346 and 262-323 of Seq ID No 1281; 4-9, 17-23, 40-49, 57-70, 72-87, 92-121, 124-133, 135-146, 158-164, 173-195, 204-213, 215-221, 230-246, 250-257, 260-273, 280-298, 304-309, 311-328, 336-343, 362-371, 373-406, 409-418, 433-446, 450-456, 490-496, 503-513, 526-542, 548-563, 569-592 and 185-212 of Seq ID No 1282; 4-17, 23-34, 36-44, 53-62, 72-85, 87-92, 110-115, 118-123, 129-150, 155-168, 172-180, 191-197, 205-211, 213-223, 225-233 and 176-201 of Seq ID No 1283; 8-26, 33-44, 52-72, 78-96, 145-151, 154-171, 204-212, 223-230, 236-251, 261-272, 280-341, 365-374, 385-394, 417-423, 434-447, 456-486, 494-500, 509-519, 530-546, 556-566, 568-579, 581-603 and 300-322 of Seq ID No 1284; 5-11, 14-21, 26-45, 52-67, 71-79, 82-97, 104-144, 151-159, 183-189, 194-205, 211-223, 241-252, 265-273, 275-280 and 93-116 of Seq ID No 1285; 13-20, 55-72, 102-109 and 10-107 of Seq ID No 1286; 5-14, 16-22, 38-45, 51-59, 61-78, 94-102, 133-142, 153-160, 187-195, 208-221, 240-254, 256-262, 270-275, 281-287, 294-299, 338-354, 356-364, 369-378, 446-452, 506-515, 557-564, 576-599 and 132-242 of Seq ID No 1287; 4-29, 41-57, 66-75, 86-93, 96-102, 109-116, 124-131, 164-171, 188-194, 199-208, 214-231, 289-295, 305-310, 314-319, 336-351, 362-368, 389-399, 403-412, 422-433, 435-441, 444-461, 463-469 and 250-326 of Seq ID No 1288; 4-16, 46-56, 59-73, 85-94, 97-105, 127-144, 160-166, 188-194, 233-238, 245-250, 270-275, 286-291 and 59-76 of Seq ID No 1289; 5-33, 58-64, 78-116, 119-127, 139-160, 171-190 and 33-56 of Seq ID No 1290; 6-11, 19-39, 50-56, 60-66, 83-133, 135-167, 195-216, 226-260, 271-319, 327-339, 342-355, 362-368, 373-394 and 170-191 of Seq ID No 1291; 4-37, 45-51, 106-119, 132-138, 150-156, 160-171, 176-182, 193-203, 207-215, 222-229, 237-244, 253-261, 296-372, 403-409, 416-422, 440-449, 451-460, 471-485, 504-510, 538-551, 560-569, 573-582, 585-597, 606-617, 632-646, 658-666, 668-676, 685-694 and 552-658 of Seq ID No 1292; 16-32, 53-79, 81-96, 102-111, 124-130, 145-152, 159-168, 176-189, 206-231, 236-244, 251-258, 286-292, 304-310, 315-326, 351-361, 383-390, 392-398, 405-411, 430-436, 456-464, 470-480, 482-496, 505-513, 531-540, 546-558, 583-589, 601-607, 621-634, 638-644, 667-673, 681-687, 693-702, 721-733, 737-744, 747-757, 760-767, 772-789, 796-807, 818-823, 846-852, 856-866, 868-880, 882-890, 913-919, 923-929 and 14-34 of Seq ID No 1293; 19-42, 55-67, 75-95, 144-156, 168-175, 183-189 and 98-109 of Seq ID No 1294; 7-17, 22-27, 34-61, 88-97, 110-117, 152-159, 175-191, 202-213, 220-232, 267-285, 296-315, 341-347, 376-392, 400-408, 421-430, 453-462, 464-470, 478-485 and 199-269 of Seq ID No 1295; 27-44, 71-80, 114-123, 127-140, 149-167, 175-188, 191-202, 205-217, 222-227, 270-276, 297-302, 308-318, 324-332, 349-368, 370-376, 382-393, 432-441, 445-459, 472-481, 489-496 and 3-25 of Seq ID No 1296; 16-49, 57-63, 84-92, 100-120, 124-130, 160-183, 189-200, 202-209, 236-244, 263-280, 283-334, 341-346, 377-389, 405-423, 452-458, 485-493, 505-513, 518-530, 547-559, 568-579, 595-601, 619-625, 638-649 and 474-504 of Seq ID No 1297; 4-18, 21-30, 43-54, 76-83, 85-106, 116-122, 124-160, 180-185, 198-204, 206-222, 230-241, 258-263, 270-302, 325-332, 359-371, 374-386, 391-402, 411-417, 435-443, 458-485 and 376-395 of Seq ID No 1298; 17-26, 28-34, 54-62, 83-93, 108-114, 119-125, 151-164, 175-187, 197-222, 224-232, 234-250, 265-270, 276-313, 315-342, 373-383 and 132-153 of Seq ID No 1299; 25-42, 47-53, 55-80, 86-113, 116-126, 128-135, 151-159, 167-174, 179-188, 207-221, 226-248, 257-266, 269-279, 297-304, 312-325 and 144-155 of Seq ID No 1300; 16-26, 61-71, 75-85, 95-113, 126-163, 175-184, 202-246, 286-291, 293-302, 320-349 and 57-76 of Seq ID No 1301; 4-19, 29-36, 48-59, 92-103, 117-139, 154-164, 190-201 and 87-113 of Seq ID No 1302; 43-51, 98-108, 123-130, 149-159, 168-179, 182-188, 201-207, 231-240, 334-340, 346-354, 369-378, 462-472, 493-503, 510-518, 520-538, 565-572, 584-590, 592-598, 616-628, 637-646, 659-675, 688-694, 699-705, 724-732, 740-755, 771-780, 792-801, 827-833, 846-856, 873-880, 882-906, 676-694 and 855-881 of Seq ID No 1303; 15-45 and 29-60 of Seq ID No 1304; 4-11, 15-34, 49-77, 92-121, 128-139, 169-176, 181-210, 216-222, 225-231, 233-246, 248-264, 271-276, 282-306, 319-326, 346-352 and 250-277 of Seq ID No 1305; 6-20, 46-54, 64-79, 81-87, 131-138, 156-162, 170-178, 190-198, 226-232, 254-263, 266-274, 293-303, 313-323, 363-369, 419-424, 426-432, 436-455, 507-513, 515-521, 534-547, 553-559, 596-610, 617-636, 638-647, 659-665, 677-683, 691-696, 710-718, 724-730, 750-755, 770-780, 802-808, 824-842, 857-862 and 436-529 of Seq ID No 1306; 11-25 and 21-35 of Seq ID No 1307; 1-12 of Seq ID No 1308; 4-10 and 2-11 of Seq ID No 1309; 12-20 and 5-14 of Seq ID No 1310; 3-10 of Seq ID No 1311; 4-22 and 10-21 of Seq ID No 1312; 4-30, 35-50 and 17-32 of Seq ID No 1313; 1-20 of Seq ID No 1314; 16-21 and 7-22 of Seq ID No 1315; 5-13 and 7-18 of Seq ID No 1316; 10-17 and 16-29 of Seq ID No 1317; 17-27 and 22-34 of Seq ID No 1318; 12-18 and 9-21 of Seq ID No 1319; 4-11, 13-94, 100-111, 115-134 and 89-106 of Seq ID No 1320; 4-24 and 10-27 of Seq ID No 1321; 4-14 and 12-23 of Seq ID No 1322; 18-33 and 13-33 of Seq ID No 1323; 16-23,2548 and 29-40 of Seq ID No 1324; 4-12, 25-64, 68-76 and 4-61 of Seq ID No 1325; 4-57, 59-66, 96-104 and 76-91 of Seq ID No 1326; 23-43, 45-75, 97-107, 112-121 and 26-62 of Seq ID No 1327; 10-24 of Seq ID No 1328; 4-50 and 30-44 of Seq ID No 1329; 4-20, 24-43 and 10-24 of Seq ID No 1330; 4-49, 56-66 and 5-54 of Seq ID No 1331; 33-44 and 15-38 of Seq ID No 1332; 4-36, 39-50 and 32-47 of Seq ID No 1333; 4-9, 16-30, 32-38 and 15-32 of Seq ID No 1334; 4-9 and 27-42 of Seq ID No 1335; 4-16, 32-43, 49-58, 64-72 and 14-27 of Seq ID No 1336; 12-19, 24-29, 37-43, 47-53, 65-72, 83-95, 112-122, 136-147, 162-168, 174-181, 189-195, 201-208, 216-221, 234-243, 270-276, 278-288, 305-316, 318-342, 350-356, 368-400, 420-428, 434-443, 471-477, 481-488, 530-535, 540-547, 566-575, 591-601, 603-609 and 624-629 of Seq ID No 763; 11-22, 28-34, 40-45, 65-86, 99-107, 115-125, 132-141, 143-150, 158-190, 203-211, 216-239, 246-257, 259-270, 272-279, 286-306, 313-332, 338-364, 371-380, 389-397, 410-418, 422-435, 467-510, 515-521, 532-538 and 547-563 of Seq ID No 764; 7-20, 28-45, 51-66, 81-104, 108-115, 124-137, 149-155, 161-206, 209-214, 222-239, 250-262, 274-282, 309-343, 351-363, 365-386, 405-413, 435-440, 446-454, 458-466, 470-477 and 482-492 of Seq ID No 765; 10-25, 29-35, 39-46, 54-71, 82-88, 102-111, 122-137, 139-145, 152-160, 162-172, 176-182, 193-201, 209-218, 226-232, 242-249, 258-268, 299-314, 318-344, 362-376, 393-399, 405-418, 426-463, 473-485, 487-492, 498-503, 518-544 and 561-567 of Seq ID No 766; 16-23, 66-90, 98-110, 125-131, 144-150, 194-200, 213-219, 221-232, 237-256, 263-281, 293-298, 311-318, 326-337, 339-354, 373-389, 396-402, 404-421, 427-439, 441-448, 452-462, 467-479, 508-530, 534-541, 544-550, 562-569, 575-581, 583-592, 595-628, 636-656, 658-672, 674-680, 687-697, 715-721, 731-736, 739-749, 754-761, 771-788, 790-797 and 813-824 of Seq ID No 767; 14-42, 51-57, 66-77, 84-96, 103-111, 129-148, 158-193, 198-208, 212-222 and 242-262 of Seq ID No 768; 4-23, 29-62, 65-84, 98-104, 128-135, 144-161, 167-173, 175-204, 219-240, 250-264, 266-278 and 280-290 of Seq ID No 769; 13-26, 33-45, 50-60, 75-81, 97-105, 123-131, 138-145, 158-166 and 168-177 of Seq ID No 770; 6-20, 23-44, 50-61, 67-82, 84-91, 104-125, 133-144, 149-156, 159-166, 173-180, 182-196, 200-206, 224-239, 245-288, 320-339, 342-349, 359-368, 377-385, 411-419, 427-435, 453-474, 481-489, 491-497, 505-514, 516-522, 536-564, 579-586, 618-631, 644-650, 654-661, 663-677, 679-689, 700-705, 710-753, 795-801, 809-814, 821-827, 842-851, 867-905, 920-925, 931-949, 954-961, 1017-1022, 1034-1040, 1047-1057, 1062-1075, 1081-1086, 1107-1117, 1119-1126, 1145-1154 and 1162-1172 of Seq ID No 771; 13-21, 47-57, 72-83, 97-102, 105-119, 125-133, 146-153, 170-177, 221-239, 245-273, 283-291, 299-305, 317-329, 335-343, 358-367, 374-380, 399-407, 430-438, 449-454, 473-479, 483-505, 517-527, 531-537, 555-560, 586-599, 601-616, 623-629, 639-647, 649-654, 658-667, 669-676, 690-709 and 714-729 of Seq ID No 772; 1428, 34-40, 45-54, 69-76, 78-83, 86-100, 116-123, 135-143, 146-161, 168-179, 187-200, 204-225, 236-250, 255-265, 271-292 and 298-314 of Seq ID No 773; 4-28, 36-42, 78-85, 106-122, 130-136, 144-150, 161-175, 180-190, 194-200, 226-234, 256-265, 274-294, 309-316, 324-333, 336-344, 373-379, 382-389, 398-404, 407-416, 422-446, 451-462 and 530-541 of Seq ID No 774; 4-15, 17-42, 71-77, 80-86, 90-116, 123-135, 144-150, 153-163 and 183-194 of Seq ID No 775; 7-13, 22-42, 56-62, 84-90, 102-112, 121-133, 140-148, 158-167, 173-181, 192-199, 227-234, 284-293, 301-307, 336-343, 345-353, 366-372, 376-397, 400-436, 439-450, 467-478, 504-510, 519-530, 532-547, 551-558, 564-575, 592-598, 619-630, 636-642, 655-661, 663-669, 671-679, 697-718, 724-736, 738-752, 759-773, 776-788, 805-823, 827-833, 842-852, 859-864, 874-881, 883-889, 905-914, 932-939, 941-957, 963-969, 978-991, 1011-1025, 1052-1062, 1067-1073, 1080-1088, 1106-1112, 1121-1132 and 1139-1152 of Seq ID No 776; 9-23, 32-38, 44-54, 64-71, 95-126, 146-154, 163-173, 190-196, 199-206, 249-256, 262-277, 291-302, 350-356, 380-398, 406-413, 420-430, 433-444, 471-478 and 492-507 of Seq ID No 777; 5-26, 57-66, 68-74, 81-87, 105-116, 122-132, 144-160, 185-212, 217-223, 228-234, 241-252, 269-274, 291-313, 318-328, 335-342, 368-375, 397-404, 411-422, 431-439, 462-472, 474-485, 493-499, 509-519, 521-527, 530-558, 563-579 and 590-602 of Seq ID No 778; 9-23, 32-38, 44-54, 64-71, 95-126, 146-154, 163-173, 190-196, 199-206, 249-256, 262-277, 291-302, 350-356, 380-398, 406-413, 420-430, 433-444, 471-478 and 492-507 of Seq ID No 779; 18-31, 34-53, 57-67, 74-81, 90-106, 136-144, 147-153, 157-163, 170-182, 192-207, 233-241, 245-251, 256-267, 274-281, 284-306, 318-330, 333-340, 345-351, 356-379, 388-404, 428-439, 455-466, 468-480, 488-505, 515-526, 553-564, 571-577, 594-600, 607-614, 616-628, 634-642, 644-651, 655-666, 672-678, 686-703, 732-738, 745-751, 755-768, 772-778, 785-805, 807-814, 817-825, 831-853, 858-868, 890-905, 918-926, 934-942, 957-970, 972-981, 990-1001, 1057-1067, 1069-1077, 1089-1109, 1116-1130, 1133-1141, 1154-1165, 1190-1206, 1208-1215, 1217-1225, 1228-1254, 1256-1263, 1271-1279, 1283-1305, 1333-1339, 1357-1367, 1373-1379, 1388-1405, 1432-1442, 1444-1451, 1453-1461, 1463-1479, 1488-1504, 1516-1524, 1532-1540, 1555-1568, 1589-1600, 1607-1613, 1633-1638, 1655-1665, 1687-1704, 1721-1728, 1731-1737, 1744-1763, 1793-1804, 1816-1823, 1833-1850, 1855-1865, 1868-1875, 1886-1902, 1916-1925, 1931-1937, 1954-1967, 1971-1977, 1987-2002, 2009-2015, 2030-2036, 2043-2049, 2053-2077, 2085-2098, 2114-2122, 2129-2136, 2154-2167, 2187-2203, 2232-2243, 2253-2274, 2286-2303, 2311-2323, 2344-2365, 2371-2378, 2388-2404, 2406-2413, 2415-2424, 2426-2450, 2454-2461, 2469-2475 and 2486-2505 of Seq ID No 780; 4-22, 24-30, 33-39, 60-72, 83-89, 128-137, 153-161, 165-174, 186-194, 212-218, 251-260, 275-284, 288-297, 309-318, 335-341, 374-383, 399-407, 411-420, 432-440, 467-482, 518-526, 572-579, 595-609, 649-663, 680-686, 691-702 and 708-714 of Seq ID No 781; 11-25, 39-57, 69-94, 100-107, 118-155, 158-171, 189-201, 226-233, 236-245, 249-262, 287-296, 298-312, 315-329, 333-342, 351-359, 364-374, 382-388, 399-407, 411-417, 419-449, 454-471, 486-492, 494-504, 515-541, 547-552, 582-600, 611-623, 625-641, 651-657, 678-692, 699-709, 713-720, 746-752, 772-781, 791-804, 829-844, 880-893, 900-910, 915-923, 936-942 and 953-970 of Seq ID No 782; 5-11, 17-24, 26-32, 36-43, 50-61, 67-73, 91-102, 111-126, 133-148, 154-161, 167-173, 179-195, 208-223, 230-240, 242-253, 270-286, 292-306, 308-347, 352-371, 373-380, 386-395, 404-410, 418-433, 436-444, 447-460, 463-477, 486-492, 522-533 and 548-553 of Seq ID No 783; 4-12, 15-27, 35-55, 68-95, 100-109, 117-122, 129-135 and 157-162 of Seq ID No 784; 25-46, 59-65, 68-75, 83-90, 93-100, 107-115, 124-135, 151-177, 183-189, 194-206, 209-215, 219-224, 251-263, 267-276, 305-311, 318-327, 332-338, 350-356, 380-396, 406-412, 414-423, 431-437, 453-461, 463-481, 483-491, 505-510, 513-523, 528-545 and 568-575 of Seq ID No 785; 10-35, 42-59, 65-70, 76-85, 92-104, 149-155, 184-191, 234-243, 248-259, 268-277, 279-287, 391-398, 410-430, 445-454, 488-494, 498-504, 518-523, 530-538, 574-590, 615-623, 627-633, 652-660, 662-670, 674-683, 703-714, 720-728, 731-737 and 751-757 of Seq ID No 786; 5-12, 39-51, 57-64, 67-84, 86-108, 124-130, 139-159, 167-179, 181-202 and 226-235 of Seq ID No 787; 12-20, 29-40, 57-77, 79-88, 97-103, 111-117, 119-137, 174-200, 202-218, 221-229, 231-238, 240-246, 254-264, 266-280, 296-308 and 321-331 of Seq ID No 788; 4-18, 20-48, 54-68, 80-105, 110-117, 120-130, 132-167, 179-214, 227-246, 259-295, 306-323, 332-339, 345-351, 357-363, 366-374 and 379-392 of Seq ID No 789; 8-21, 23-31, 53-66, 69-94, 99-113, 119-184, 190-214, 233-244, 268-274, 279-284, 289-298, 300-311, 315-337, 344-350, 364-383 and 385-397 of Seq ID No 790; 26-38, 43-63, 67-76, 79-98, 105-112, 115-121, 132-144, 148-153, 179-184, 194-203, 239-245, 261-278 and 282-315 of Seq ID No 791; 13-22, 24-30, 49-61, 65-72, 90-97, 99-105, 115-131, 152-160, 165-171, 176-188, 202-221, 231-250, 255-274, 280-286, 288-296, 331-337, 339-347, 350-358, 374-385, 391-408, 418-427, 438-453, 468-476, 482-490, 497-506, 526-532, 534-583, 696-702, 713-719, 730-748, 750-758, 762-778, 802-808, 825-857, 864-950, 963-1004, 1015-1023 and 1046-1058 of Seq ID No 792; 4-10, 22-28, 35-44, 58-66, 74-84, 86-98, 116-131, 138-143, 181-186, 224-230, 241-253, 282-292, 305-313, 325-331, 333-341, 348-360, 384-391, 395-408, 415-429, 431-445, 525-531, 558-564, 567-584, 601-612, 624-637, 645-652, 682-687 and 700-706 of Seq ID No 793; 4-13, 19-27, 33-40, 57-82, 107-115, 117-125, 162-173, 197-206, 215-226, 256-266, 291-298, 303-310, 318-323, 331-336, 345-360, 379-396, 405-410, 426-434, 454-462, 468-476, 482-497, 512-518, 529-541, 556-564, 570-581, 589-594, 601-610, 629-637, 639-648, 663-670, 704-711, 725-738, 746-768, 770-780, 787-804, 817-823, 830-837, 876-882, 930-936 and 939-968 of Seq ID No 794; 5-13, 20-65, 67-74, 107-115, 128-169, 171-195, 238-244, 256-287 and 292-298 of Seq ID No 795; 7-13, 16-77, 89-96, 104-114, 117-125, 148-160, 167-191, 193-202 and 227-236 of Seq ID No 796; 21-36, 41-47, 54-89, 122-129, 138-165, 173-190, 196-216 and 221-229 of Seq ID No 797; 8-45, 135-140, 172-182, 189-196, 206-216, 218-235, 260-269, 272-278, 307-313, 333-344, 352-359, 371-395, 403-414, 416-422, 426-438, 451-470, 478-484, 493-502, 504-511 and 514-533 of Seq ID No 798; 6-25, 49-59, 65-96, 107-115, 117-124, 135-151, 176-185 and 203-209 of Seq ID No 799; 5-15, 46-56, 58-81, 83-111, 118-138, 152-160 and 165-175 of Seq ID No 800; 7-16, 18-24, 36-43, 54-60, 65-73, 88-94, 107-113, 122-128, 134-141, 162-171, 182-216, 218-235, 249-263, 266-278, 290-301 and 308-338 of Seq ID No 801; 4-14, 19-24, 27-36, 38-51, 63-73, 90-96, 102-121, 138-150, 157-174, 176-202, 212-225, 229-245, 250-258, 261-268, 279-291, 293-310, 319-338, 358-368, 371-389, 393-398, 404-413, 416-433, 435-442 and 458-471 of Seq ID No 802; 17-40, 47-82, 85-93, 101-113, 153-172, 180-186, 190-208, 215-224, 252-261, 269-279, 283-289, 294-306, 311-328, 397-408, 416-423, 425-437, 492-499, 513-534, 542-548 and 550-555 of Seq ID No 803; 8-17, 29-43, 45-52, 58-69, 87-100, 102-112, 148-163, 172-187, 190-208, 210-227, 232-239, 245-253, 258-263, 286-299, 313-334, 346-362, 373-388, 391-410, 417-423, 425-430, 434-446, 457-472, 483-489, 496-502, 518-524, 537-546, 555-560, 602-610, 637-646, 676-689, 698-704, 706-742, 750-778, 780-791, 806-842, 864-879, 881-888, 890-899, 901-908, 910-921, 941-947, 953-959, 967-980, 990-995, 1000-1061, 1073-1079, 1081-1092, 1096-1118, 1121-1168, 1174-1185, 1195-1209, 1219-1232, 1237-1243, 1250-1274, 1276-1286, 1302-1319, 1324-1333, 1339-1344, 1349-1361, 1370-1376, 1418-1427, 1435-1449, 1453-1469, 1473-1478, 1482-1495, 1509-1517 and 1519-1526 of Seq ID No 804; 4-14, 16-32, 42-47, 65-71, 82-109, 128-145, 158-171, 177-191, 197-228 and 230-236 of Seq ID No 805; 16-22, 26-42, 52-72, 75-89, 97-102, 114-147, 154-160, 165-170, 172-200, 202-229, 231-244, 256-261, 267-278, 286-294, 312-319, 330-336, 340-346, 360-373, 375-383, 386-396, 420-441, 443-474, 484-491, 496-517, 535-574, 600-606, 608-624, 636-643, 646-658, 664-687, 692-703, 716-725, 733-750 and 755-764 of Seq ID No 806; 4-14, 24-34, 47-69, 81-90, 98-112, 144-153, 161-169, 189-196, 202-208, 213-220, 243-249, 256-262, 265-271, 279-286, 299-307, 310-324, 326-345, 356-369, 397-416, 424-429 and 432-441 of Seq ID No 807; 4-9, 14-23, 50-56, 59-68, 77-102, 111-120, 126-152, 161-167, 174-180, 189-202, 204-228, 237-245, 259-266, 278-285 and 300-309 of Seq ID No 808; 23-35, 71-77, 94-100, 134-140, 157-163, 189-195, 211-219, 221-231, 238-244, 246-253, 263-277, 298-306, 315-321, 337-342, 350-355, 369-377, 389-400, 408-416, 422-427, 441-449, 465-477, 481-488, 527-532 and 534-551 of Seq ID No 809; 14-20, 35-48, 53-63, 71-77, 95-101, 114-121, 123-133, 144-151, 153-160, 162-170, 190-197, and 201-211 of Seq ID No 810; 9-17, 26-46, 65-72 and 90-101 of Seq ID No 811; 21-39, 46-53, 68-96, 107-113, 118-124, 126-135, 158-185, 196-202, 204-213, 219-226, 246-253, 267-275, 277-285, 299-317, 319-338, 404-410, 421-428 and 435-463 of Seq ID No 812; 17-24, 29-40 and 47-56 of Seq ID No 813; 17-25, 32-77, 82-91, 100-128, 161-169, 194-207, 211-218, 227-232, 239-245, 255-260, 278-300, 311-325, 342-356, 382-390, 393-401, 416-460, 467-487, 491-503, 505-512, 516-532, 551-565, 568-575, 594-601, 610-632, 638-643, 647-670, 672-685, 699-710 and 712-726 of Seq ID No 814; 5-14, 25-46, 49-55, 59-65, 77-85, 98-107, 125-169, 181-186, 223-240, 271-281, 290-300, 306-313, 315-322, 330-337, 348-359, 370-377, 384-392, 416-424, 428-445, 456-469, 479-486, 502-510, 518-523, 525-535, 555-575, 578-585, 605-612, 624-637, 661-685, 693-700, 708-721, 723-729, 744-754 and 770-775 of Seq ID No 815; 4-33, 38-52, 92-106, 116-124, 133-138, 142-148, 153-159, 161-168, 245-257, 282-287, 314-321, 331-336, 355-361, 366-372, 374-390, 396-409, 447-455, 484-490, 498-504, 511-519, 531-538, 540-545, 574-581, 586-596, 625-631, 644-655, 668-674, 685-692, 718-723, 728-741, 771-778, 787-797, 801-807, 819-828 and 832-844 of Seq ID No 816; 5-25, 31-39, 72-79, 93-102, 104-110, 122-132, 138-146, 157-189, 192-198, 205-214, 226-233, 240-248, 269-275, 282-298, 304-310, 313-327 and 342-348 of Seq ID No 817; 12-39, 49-55, 59-69, 95-104, 106-111, 116-128, 161-184, 186-217, 229-237, 240-252, 254-269, 271-278, 311-326, 331-338, 348-356, 364-370, 375-408, 429-460, 471-482, 484-500, 508-516, 527-536, 539-548, 560-576, 583-605, 643-655, 662-676, 682-687, 691-697, 703-715, 726-734, 737-746, 757-768, 778-789, 791-814, 821-826, 834-854, 890-899, 914-925, 947-954, 959-967, 984-990, 993-1000, 1012-1021, 1039-1044, 1065-1070, 1081-1098, 1136-1142, 1149-1157, 1165-1170, 1175-1186, 1191-1201, 1225-1265, 1276-1285, 1292-1300, 1323-1333, 1351-1361, 1366-1372, 1383-1397, 1404-1412, 1417-1425, 1431-1448, 1468-1473, 1483-1494, 1496-1504 and 1506-1530 of Seq ID No 818; 18-53, 64-93, 95-105, 124-135, 143-148, 155-161, 163-171, 184-198, 238-245, 258-271, 273-284, 287-292, 302-310, 312-320, 322-341, 349-365, 377-403, 407-414, 417-423, 444-453, 455-469, 471-495, 503-511, 536-557, 579-586, 588-609, 619-626, 632-638, 643-649, 656-663, 669-680, 682-688, 699-714, 729-739, 755-761, 768-776, 781-793, 801-815, 821-826, 833-842 and 863-869 of Seq ID No 819; 8-15, 24-40, 51-65, 78-89, 102-111, 117-154, 164-177, 181-192, 198-209, 216-222, 230-237, 241-248, 254-268, 285-293, 298-321, 331-338, 366-373, 384-389, 392-415, 429-439, 441-451, 453-459, 471-486, 489-501 and 524-535 of Seq ID No 820; 10-18, 26-38, 48-54, 60-69, 77-83, 88-95, 119-126, 133-169, 172-185, 193-206, 214-225, 236-250, 269-275, 278-301, 320-329, 336-341, 347-353, 356-369 and 389-396 of Seq ID No 821; 27-32, 37-50, 68-82, 84-108, 134-145, 149-154, 162-170, 172-182, 194-200, 205-224, 232-270, 293-299 and 312-328 of Seq ID No 822; 8-14, 19-45, 65-75, 82-87, 95-105, 135-149, 154-160, 175-184, 205-226, 229-244, 249-256, 284-296, 298-304 and 321-348 of Seq ID No 823; 4-10, 15-24, 26-53, 55-71, 78-83, 90-112, 128-148, 156-163, 165-179, 203-213, 228-239, 250-259, 277-285, 292-314, 322-330, 335-340, 345-360, 363-370, 381-396, 404-409 and 416-427 of Seq ID No 824; 20-32, 37-46, 53-65, 75-83, 86-95, 99-105, 121-133, 139-151, 183-190, 199-205 and 216-227 of Seq ID No 825; 9-25, 29-48, 50-100, 102-126, 131-149, 167-173, 210-217, 224-256, 259-265, 275-292, 295-301, 308-313, 319-335, 337-346, 352-359, 362-382, 393-423, 436-449, 468-476, 481-487, 492-500, 526-534, 537-548, 560-567, 569-579, 590-598, 604-613, 629-636 and 644-656 of Seq ID No 826; 4-18, 25-31, 33-39, 42-53, 64-92, 97-111, 123-129, 134-146, 165-171, 173-190, 192-213, 226-239, 251-273, 283-298, 316-324, 339-345, 350-356, 361-376, 400-408, 418-440, 444-451, 476-481, 503-516, 524-542, 555-563, 581-594, 607-629, 634-641, 647-670, 711-719, 728-738, 755-765, 772-780, 800-815, 822-833, 842-852, 860-865, 874-880, 891-913, 926-938, 941-946, 961-978, 984-990, 1014-1024, 1038-1044, 1052-1092, 1099-1111, 1120-1140, 1153-1168, 1170-1190, 1193-1210, 1221-1233, 1253-1264, 1268-1274, 1283-1289, 1295-1300, 1303-1327, 1338-1351, 1362-1368, 1391-1396, 1410-1416, 1429-1441, 1471-1477, 1483-1513, 1526-1555, 1585-1591, 1596-1630 and 1632-1639 of Seq ID No 827; 10-25, 34-54, 57-67, 77-96, 111-121, 127-139, 151-157, 161-179, 183-198, 201-219, 233-239, 247-252, 268-276, 283-294, 299-309 and 319-324 of Seq ID No 828; 7-15, 20-32, 85-97, 102-109, 117-133, 137-161, 176-184, 186-203, 213-225, 227-251, 258-274, 280-290, 319-325, 335-364, 377-387, 403-410, 412-421, 436-454, 458-475, 478-504, 512-521, 541-567, 601-609, 614-622, 635-651, 657-669, 687-694, 702-708, 717-733, 735-741, 766-786, 788-800, 813-818 and 823-834 of Seq ID No 829; 4-38, 49-69, 75-85, 110-115, 127-134, 167-173, 203-211, 240-245, 258-264, 293-299, 301-316, 348-354, 356-362, 386-391, 405-410, 456-462, 474-483, 494-499, 511-516, 523-528, 533-538, 549-557, 579-585, 587-593, 607-612, 618-625, 627-634, 654-660, 664-670, 682-688, 697-702, 729-736, 749-756, 783-793, 804-812, 817-829, 862-868, 915-920, 944-950, 954-960, 1000-1031, 1044-1056, 1069-1077, 1079-1084, 1097-1118, 1139-1146, 1152-1158, 1165-1176, 1181-1186, 1201-1213, 1257-1263, 1268-1276, 1278-1285, 1354-1360, 1369-1378, 1386-1396, 1439-1446, 1491-1501, 1526-1548 and 1556-1564 of Seq ID No 830; 4-13, 20-34, 47-53, 58-65, 76-82, 89-106, 139-160, 165-182 and 191-205 of Seq ID No 831; 20-40, 42-49, 58-67, 71-80, 95-100, 116-122, 131-142, 145-152, 158-173, 179-186, 196-202, 229-241, 258-270, 289-300, 302-320, 345-351, 370-382, 391-404, 455-464, 504-514 and 516-527 of Seq ID No 832; 5-14, 26-35, 38-45, 54-60, 63-79, 121-127, 137-145, 152-162, 167-173, 175-183, 191-202, 218-228, 238-263, 278-295, 303-316, 320-335, 337-345, 359-365 and 382-400 of Seq ID No 833; 4-17, 31-38, 46-61, 68-73, 76-97, 128-139, 150-156, 166-172, 174-182, 184-212, 219-225, 238-245 and 249-262 of Seq ID No 834; 4-24, 31-42, 45-54, 59-71, 83-92, 108-115, 123-130, 149-156, 202-208 and 224-233 of Seq ID No 835; 4-16, 25-41, 44-52, 60-66, 73-82, 92-101, 108-114, 133-138, 145-155, 177-185 and 194-202 of Seq ID No 836; 4-9, 21-39, 72-78, 82-88, 99-131, 136-143, 151-162, 164-187, 189-204, 208-216, 223-229, 232-240, 246-256, 269-283, 288-299, 311-321 and 328-335 of Seq ID No 837; 26-33, 39-45, 50-62, 79-85, 87-101, 116-131, 142-152, 154-186, 193-199, 201-216, 221-243, 266-272, 281-297, 324-330, 335-342, 345-355, 375-383 and 407-413 of Seq ID No 838; 4-22, 27-36, 60-69, 90-98, 107-113, 117-123, 127-134, 137-151, 154-161, 169-178, 185-192, 202-208, 214-223, 230-239, 245-255, 266-275, 307-317, 323-337, 339-353, 361-379, 385-391, 393-401, 415-422, 424-429, 434-442, 444-449 and 470-480 of Seq ID No 839; 4-22, 29-34, 37-44, 53-80, 98-110, 127-142, 144-156 and 158-165 of Seq ID No 840; 4-12, 14-20, 27-34, 39-47, 51-67, 69-81, 89-97, 105-119, 121-133, 140-149 and 151-161 of Seq ID No 841; 17-24, 34-40, 78-85, 227-233, 294-315, 327-335, 345-351, 354-359, 363-368, 388-403, 405-411, 413-419, 425-434, 462-472, 480-500, 528-536, 542-560, 566-573, 579-589, 593-606, 614-646, 651-658, 663-669, 686-726, 734-747, 754-778, 787-806, 809-825, 827-839 and 876-887 of Seq ID No 842; 9-29, 35-40, 49-63, 69-76, 110-134, 141-147 and 160-169 of Seq ID No 843; 6-31, 33-47, 53-59, 62-78, 93-98, 105-114, 121-130, 136-169, 172-195, 197-208, 223-228, 236-267, 277-283, 295-307, 309-325, 330-339, 345-352, 358-370, 379-391, 419-450, 461-508, 510-519, 521-539, 547-575, 578-587, 589-603, 612-633, 644-657, 666-678, 694-706, 711-717, 728-742, 759-769, 777-784, 800-806, 820-838, 841-848, 851-856, 870-876, 887-895, 908-914, 923-940, 942-953 and 969-988 of Seq ID No 844; 12-39, 41-50, 68-74, 87-97, 113-136, 141-156, 167-180, 190-196, 204-223, 229-235 and 247-278 of Seq ID No 845; 10-16, 25-53 and 64-74 of Seq ID No 846; 5-43, 46-81, 88-96, 137-142, 163-191, 195-203, 210-235, 241-254, 256-276, 280-288, 292-305, 307-313, 317-333, 335-343, 347-353, 357-363, 372-381, 384-389 and 399-409 of Seq ID No 847; 8-14, 22-32, 35-46, 57-75, 83-91, 100-106, 108-114, 125-131, 133-142, 157-175, 186-211, 217-235, 246-361, 367-372, 382-394, 396-405, 414-438, 459-471, 504-510, 513-535 and 538-560 of Seq ID No 848; 8-20, 25-30, 46-62, 67-73, 98-103, 105-114, 119-141, 144-153, 168-178, 181-193, 198-204, 208-227, 236-242, 249-258, 281-288, 291-306, 327-336, 340-361, 368-380, 389-409, 417-426, 428-435, 442-453, 468-486, 488-496, 498-509, 511-523, 540-553, 566-579, 587-603, 629-636 and 677-682 of Seq ID No 849; 9-25, 41-61, 68-75, 81-102, 106-141, 158-165 and 172-191 of Seq ID No 850; 7-38, 43-58, 67-79, 92-99, 103-111, 118-128, 130-139, 152-165, 170-186, 192-223 and 225-251 of Seq ID No 851; 4-16, 21-36, 38-47, 54-64, 92-103, 117-126, 135-155, 157-200, 202-223, 231-239 and 246-262 of Seq ID No 852; 6-38, 44-57, 62-75, 82-96, 104-109, 115-122, 129-136, 147-160, 185-193, 200-206, 230-245, 248-269, 274-282, 289-298, 306-314, 321-335, 344-362, 372-377, 385-394, 422-431, 438-447, 479-505, 529-541, 547-558, 564-571, 573-579, 606-612, 621-632, 638-649, 656-664, 676-683, 695-704, 711-716, 728-734, 736-742, 776-781, 783-791, 809-816, 850-856, 866-872, 889-898, 906-912, 919-926, 944-953, 987-992, 1015-1022, 1024-1038, 1066-1072, 1097-1105, 1113-1119, 1121-1136 and 1147-1154 of Seq ID No 853; 5-14, 27-42, 48-67, 71-83, 85-91, 105-112, 114-135, 139-147, 159-165, 169-185, 188-195, 199-208, 212-221, 231-253, 264-272, 275-282, 290-303, 309-319, 324-331, 340-358, 380-405, 419-425, 438-444, 450-463, 468-477, 497-514, 520-533, 549-556, 568-574, 617-626, 637-643, 661-668, 674-684, 705-713, 718-733 and 735-769 of Seq ID No 854; 5-16, 29-53, 63-71, 74-93, 124-132, 140-192, 199-216, 227-258, 260-268, 272-282, 285-300, 323-331, 353-368, 389-396, 414-421, 429-441, 448-454, 459-467, 474-493, 501-508, 516-575, 593-612, 631-661, 665-693, 715-724, 736-751, 754-765, 771-777, 782-791, 809-820 and 823-853 of Seq ID No 855; 51-70, 81-95, 103-110, 117-123, 130-136, 142-160, 174-180, 199-207, 268-274, 280-296, 347-358, 361-369, 390-396, 401-409, 424-430, 442-448, 455-467, 501-508, 523-533 and 553-560 of Seq ID No 856; 4-10, 35-45, 56-92, 108-116, 127-133, 137-146, 156-186, 194-203, 225-234, 242-251, 272-283, 285-306, 310-315, 322-330, 358-371, 373-379 and 389-396 of Seq ID No 857; 4-32, 38-46, 66-83, 88-95, 110-118, 123-141, 169-180, 200-208, 217-225, 237-245, 247-261, 263-272, 275-282, 291-302, 310-338, 345-353, 360-369, 371-378, 386-394, 398-413, 416-422 and 437-448 of Seq ID No 858; 4-11, 18-26, 31-47, 59-68, 74-92, 98-144, 149-158, 173-180, 200-210, 216-223 and 239-250 of Seq ID No 859; 4-10, 29-56, 93-99, 119-124, 133-140, 159-171, 187-195, 200-214, 221-233, 249-255, 263-271, 285-291 and 310-316 of Seq ID No 860; 29-35, 68-85, 92-99, 107-122, 124-135, 138-144, 146-158, 173-205, 208-227, 232-259, 277-285, 317-324 and 326-333 of Seq ID No 861; 9-18, 21-27, 42-49, 58-75, 85-93, 100-106, 108-122, 125-131, 140-150, 155-162, 165-186, 201-206, 209-214, 220-249, 261-267, 279-289, 292-299, 304-310, 328-338, 343-355, 370-378, 381-389, 393-400, 411-418, 424-436, 438-449, 474-496, 524-531, 556-572, 586-592, 606-617, 623-629, 648-657, 659-676, 696-702, 709-717, 735-755, 763-775, 788-809 and 835-843 of Seq ID No 862; 20-32, 52-63, 75-88, 96-101, 116-154, 164-173, 187-199, 202-240, 253-279, 285-298, 305-318 and 324-339 of Seq ID No 863; 4-22, 24-29, 36-43, 63-75, 90-96, 118-128, 137-145, 168-182, 200-210, 212-221, 242-250, 289-316, 318-323, 327-339, 381-387, 401-411, 424-434, 443-449, 453-465, 485-498, 500-508, 510-515, 521-528, 538-545, 554-560, 574-606, 619-627, 645-658 and 681-688 of Seq ID No 864; 8-18, 45-50, 52-62, 76-82, 84-107, 109-116, 130-137, 141-150, 152-158, 164-170, 175-186 and 188-196 of Seq ID No 865; 11-19, 24-34, 41-48, 55-63, 68-81, 85-91, 100-106, 111-120, 131-138, 144-161, 168-176, 192-203, 213-225, 227-234, 236-243, 255-262, 265-274, 282-290, 296-301, 309-316, 349-359, 368-377, 384-390, 398-412, 417-433, 439-448, 467-475, 481-486, 501-508, 510-517, 521-532 and 538-545 of Seq ID No 866; 442, 48-59, 74-88, 92-119, 121-149, 163-180, 185-195 and 199-209 of Seq ID No 867; 5-26, 60-76, 104-114, 119-128, 136-141, 156-167, 186-198, 218-237, 260-267, 275-290, 309-318 and 328-335 of Seq ID No 868; 5-17, 23-48, 60-73, 75-82, 98-108, 110-128, 146-160, 168-180, 191-213, 229-237, 240-252, 269-277 and 305-313 of Seq ID No 869; 8-28, 53-62, 70-78, 81-89, 97-115, 125-148, 155-168, 174-186, 196-202, 207-214, 220-238, 241-256, 258-267, 284-290, 297-306, 312-317, 322-327, 330-344, 352-358, 367-385, 387-395, 400-414, 422-430, 438-455, 458-466, 491-507, 539-544, 561-566, 571-577, 598-604, 617-623 and 640-647 of Seq ID No 870; 7-14, 24-32, 56-72, 95-100, 108-114, 123-138, 143-153, 203-221, 224-230, 260-269, 290-297, 302-308, 321-355, 364-370, 398-427, 434-439, 446-473, 505-510, 512-518, 536-546, 573-587, 589-595, 629-636, 683-709, 728-734, 778-786, 795-802, 825-830, 911-934, 944-956, 960-970, 977-985, 987-993, 1009-1015, 1027-1035, 1047-1052 and 1058-1065 of Seq ID No 871; 4-16, 21-36, 38-47, 54-64, 92-103, 117-126, 135-155, 157-200, 202-223, 231-239 and 246-262 of Seq ID No 872; 4-10, 35-45, 56-92, 108-116, 127-133, 137-146, 156-186, 194-203, 225-234, 242-251, 272-283, 285-306, 310-315, 322-330, 358-371, 373-379 and 389-396 of Seq ID No 873; 4-40, 47-59, 62-75, 81-87 and 107-113 of Seq ID No 874; 6-13, 21-31, 44-54, 64-70 and 77-84 of Seq ID No 875; 17-24, 26-41 and 50-55 of Seq ID No 876; 24-32 of Seq ID No 877; 15-28 and 36-44 of Seq ID No 878; 4-25, 28-34, 37-43, 45-52, 59-69, 85-91 and 104-114 of Seq ID No 879; 13-39, 51-63, 80-101, 141-149, 165-176 and 191-210 of Seq ID No 880; 6-19 of Seq ID No 881; 4-19, 23-42, 57-66, 98-114, 121-127, 148-155, 164-181, 194-204, 217-222, 248-258, 266-285, 288-296, 309-329, 331-342, 344-353 and 361-378 of Seq ID No 882; 4-14 and 26-32 of Seq ID No 883; 10-18, 29-62, 72-91, 106-120, 147-154, 185-195, 203-210, 220-238, 262-267, 275-285, 315-365, 376-388, 390-399 and 414-423 of Seq ID No 884;8-17, 43-49, 63-70, 79-86 and 89-100 of Seq ID No 885; 4-19, 21-31 and 54-68 of Seq ID No 886; 4-10 and 26-31 of Seq ID No 887; 4-12, 21-30 and 37-51 of Seq ID No 888; 4-11 and 20-46 of Seq ID No 889; 4-10 and 23-28 of Seq ID No 890; 4-28 and 32-50 of Seq ID No 891; 4-25 of Seq ID No 892; 35-53 of Seq ID No 893; 14-20, 48-56, 63-68 and 79-87 of Seq ID No 894; 34-40 and 50-62 of Seq ID No 895; 23-34 and 59-72 of Seq ID No 896; 4-16, 28-39, 62-68 and 85-97 of Seq ID No 897; 10-20, 23-31, 35-42 and 48-62 of Seq ID No 898; 4-44, 46-52, 54-64 and 70-85 of Seq ID No 899; 4-12 and 24-40 of Seq ID No 900; 10-22, 24-46, 52-57 and 74-81 of Seq ID No 901; 10-20, 27-40 and 48-57 of Seq ID No 902; 24-37 of Seq ID No 903; 20-29, 39-45, 53-65 and 67-85 of Seq ID No 904; 6-22, 25-41, 43-66, 74-84, 87-94 and 107-113 of Seq ID No 905; 4-12, 17-23 and 39-62 of Seq ID No 906; 4-13, 21-45 and 51-70 of Seq ID No 907; 15-25 and 33-52 of Seq ID No 908; 8-19, 44-53, 60-70, 78-85 and 97-107 of Seq ID No 909; 13-23, 31-40, 59-66, 8490 and 96-110 of Seq ID No 910; 4-25, 37-48, 56-71, 83-97, 112-132, 140-150 and 152-157 of Seq ID No 911; 4-17, 19-26, 41-49, 63-87, 92-99 and 113-131 of Seq ID No 912; 4-10 and 17-23 of Seq ID No 913; 4-19, 26-35, 43-50 and 61-72 of Seq ID No 914; 5-10, 31-38, 42-70 and 84-99 of Seq ID. No 915; 12-26 and 48-55 of Seq ID No 916; 4-10, 13-63, 69-81, 83-105 and 143-150 of Seq ID No. 917; 4-12, 18-29 and 49-68 of Seq ID No 918; 19-25, 27-33, 43-84, 86-92, 111-118, 125-136, 138-147, 158-165 and 181-192 of Seq ID No 919; 20-29, 50-56, 63-85, 89-98 and 120-128 of Seq ID No 920; 4-11 and 41-47 of Seq ID No 921; 14-27 and 50-62 of Seq ID No 922; 10-19, 35-41 and 43-51 of Seq ID No 923; 17-40, 47-66 and 70-78 of Seq ID No 924; 549-576 and 595-622 of Seq ID No 1007; 592-616 of Seq ID No 1031; 9-22 of Seq ID No 1032; 896-923 of Seq ID No 317; 178-204, 222-248, 244-269 and 265-296 of Seq ID No 320; 180-209 and 205-233 of Seq ID No 321; 242-270 and 266-294 of Seq ID No 322; 718-740, 328; 197-229 and 225-256 of Seq ID No 345; 42-61 of Seq ID No 359; 34-53 of Seq ID No 425; 1522-1552 of Seq ID No 431; 415-440 of Seq ID No 462; 32-51 of Seq ID No 463; 342-369 and 457-484 of Seq ID No 466; 554-582, 578-606 and 632-659 of Seq ID No 467; 12-33 and 27-48 of Seq ID No 469; 52-81, 77-105 and 101-129 of Seq ID No 471; 76-102 of Seq ID No 472; 48-77 of Seq ID No 473; 6-35 of Seq ID No 474; 189-218 and 214-244 of Seq ID No 456; 122-149 of Seq ID No 459; 106-136 of Seq ID No 460; 204-224 of Seq ID No 477; 273-297 of Seq ID No 301; 70-88 of Seq ID No 302; 134-147 of Seq ID No 303; 290-317 and 367-388 of Seq ID No 304; 240-265 of Seq ID No 305; 796-824 of Seq ID No 306; 83-110 and 106-133 of Seq ID No 308; 120-148 of Seq ID No 309; 71-106 of Seq ID No 310; 278-305 of Seq ID No 312; 115-137 of Seq ID No 313; 378-400 of Seq ID No 315; 111-137 of Seq ID No 316;3-19 of Seq ID No 318; 103-119 of Seq ID No 323; 89-116, 112-139 and 135-162 of Seq ID No 326; 259-268 of Seq ID No 390; 2-19 of Seq ID No 501; 83-114 of Seq ID No 488; 15-33 of Seq ID No 496; 52-84 and 70-93 of Seq ID No 498; 28-54 of Seq ID No 502; 34-66 of Seq ID No 514; 4-32 and 28-56 of Seq ID No 528; 21-47 of Seq ID No 513; 32-57 of Seq ID No 490; 96-115 of Seq ID No 542; 161-176 of Seq ID No 543; 58-89, 85-116 and 112-143 of Seq ID No 557; 97-115 of Seq ID No 559; 84-106 of Seq ID No 565; 3-19 of Seq ID No 572; 38-63 of Seq ID No 575; 33-64, 60-91 and 87-119 of Seq ID No 580; 93-123 of Seq ID No 558; 16-34 of Seq ID No 563; 61-92 and 88-120 of Seq ID No 593; 48-76, 72-100, 96-124 and 120-147 of Seq ID No 568; 111-146 of Seq ID No 569; 26-50, 46-71 and 67-92 of Seq ID No 570; 11-46 of Seq ID No 573; 92-127 of Seq ID No 574; 46-78, 74-106 and 102-133 of Seq ID No 582; 94-124 of Seq ID No 584; 2-29 of Seq ID No 585; 10-43 of Seq ID No 597; 24-51, 47-74 and 70-98 of Seq ID No 600; 15-42 and 38-58 of Seq ID No 551; 259-268 of Seq ID No 390; 66-94 of Seq ID No 598; 17-43 of Seq ID No 594; 178-198 of Seq ID No 375; 441-473, 469-501 and 497-531 of Seq ID No 385; 105-127 of Seq ID No 387; 8-35, 36-63 and 64-91 of Seq ID No 388; 216-231 of Seq ID No 391; 203-222 of Seq ID No 395; 180-210, 206-236 and 232-261 of Seq ID No 404; 6-28 of Seq ID No 405; 224-238 of Seq ID No 408; 274-291 of Seq ID No 411; 134-148 of Seq ID No 413; 133-153 of Seq ID No 414; 258-284 of Seq ID No 416; 8-33, 28-53 and 49-74 of Seq ID No 419; 103-127, 123-147, 143-166 and 162-185 of Seq ID No 420; 179-206 of Seq ID No 421; 15-27 of Seq ID No 434; 240-261 of Seq ID No 435; 386-402 of Seq ID No 437; 57-74 of Seq ID No 438; 343-375, 371-403 and 399-432 of Seq ID No 448; 369-390 of Seq ID No 450; 276-292 of Seq ID No 452; 196-227, 223-254, 250-280, 284-311, 307-334, 330-356 and 352-378 of Seq ID No 453; 253-271 of Seq ID No 454; 419-432 of Seq ID No 455; 24-51 of Seq ID No 370; 259-268 of Seq ID No 390; 23-48 of Seq ID No 371; 179-198 of Seq ID No 372; 431-455 of Seq ID No 373; 319-349, 345-374 and 370-399 of Seq ID No 374; 455-479 and 475-498 of Seq ID No 376; 653-675 of Seq ID No 377; 75-108 of Seq ID No 378; 1362-1388 of Seq ID No 379; 8-36, 32-60 and 56-84 of Seq ID No 380; 1-25 of Seq ID No 381; 65-88 of Seq ID No 382; 102-134 of Seq ID No 383; 104-131 of Seq ID No 384; 206-231 of Seq ID No 386; 5-23 of Seq ID No 389; 510-536 and 546-577 of Seq ID No 390; 300-326 and 1320-1353 of Seq ID No 392; 205-240 of Seq ID No 393; 971-1003 of Seq ID No 394; 455-483 and 1232-1263 of Seq ID No 396; 12-40 of Seq ID No 397; 3-32 of Seq ID No 398; 68-103 of Seq ID No 399; 188-222 of Seq ID No 400; 25-55 of Seq ID No 401; 98-130 of Seq ID No 402; 211-236 of Seq ID No 403; 362-392 of Seq ID No 406; 365-389 of Seq ID No 407; 60-81 of Seq ID No 409; 69-104 of Seq ID No 410; 124-152 and 148-177 of Seq ID No 412; 74-102 of Seq ID No 415; 1019-1051, 1162-1190, 1186-1214, 1210-1238 and 1234-1261 of Seq ID No 417; 692-724 of Seq ID No 423; 259-268 of Seq ID No 390; 15-41, 37-62 and 58-83 of Seq ID No 418; 59-87, 83-110 and 111-140 of Seq ID No 422; 174-206 of Seq ID No 424; 96-119 of Seq ID No 426; 128-152 of Seq ID No 427; 104-130 of Seq ID No 428; 542-568 of Seq ID No 429; 107-129 of Seq ID No 430; 112-137 of Seq ID No 432; 52-80 of Seq ID No 433; 19-45 of Seq ID No 436; 1113-1144 of Seq ID No 441; 94-119, 110-135 and 136-160 of Seq ID No 439; 89-115 of Seq ID No 442; 474-496 and 492-515 of Seq ID No 443; 14-40 of Seq ID No 444; 422-448 of Seq ID No 445; 294-333 of Seq ID No 447; 113-140 of Seq ID No 449; 8-36, 32-61 and 57-86 of Seq ID No 451; 1-28, 120-147 and 143-170 of Seq ID No 440; -14-11 of Seq ID No 446; 96-124 of Seq ID No 1042; 550-575, 571-596 and 592-616 of Seq ID No1031; 144-170 of Seq ID No1046; 79-100 of Seq ID No1048; 73-96 of Seq ID No1050; 21-43 of Seq ID No1051; 18-42 of Seq ID No1052; 16-50 of Seq ID No1053; 7-25 of Seq ID No1055; 8-44 of Seq ID No1056; 22-51 of Seq ID No1057; 2-25 of Seq ID No1059; 9-44 of Seq ID No1060; 6-34, 30-58, 54-82 and 78-105 of Seq ID No1061; 9-32 of Seq ID No1062; 23-46 and 42-65 of Seq ID No1063; 1-25 of Seq ID No1064; 17-43 of Seq ID No1065; 11-38 of Seq ID No1067; 44-72, 68-95 and 91-118 of Seq ID No1009; 163-187 of Seq ID No1043; 586-612 of Seq ID No1011; 259-284, 283-313, 309-339 and 335-365 of Seq ID No1012; 311-333 of Seq ID No1016; 245-269, 474-504, 500-530 and 526-555 of Seq ID No1018; 270-302, 298-330 and 326-358 of Seq ID No1021; 58-86, 82-109, 105-133, 325-353, 349-378 and 374-403 of Seq ID No1023; 9-33 of Seq ID No1032; 96-124 of Seq ID No1042; 447-475, 471-498 and 494-521 of Seq ID No 1022; 285-316, 312-343, 339-371, 367-399, 515-541, 537-564 and 560-586 of Seq ID No 1027; 149-175, 171-197 and 193-217 of Seq ID No 997; 43-73, 69-99, 95-124, 163-189, 185-210, 206-231, 227-252, 248-273, 269-294, 313-340, 336-362, 358-384, 456-481, 477-502 and 498-523 of Seq ID No 998; 136-163, 159-186, 193-217, 253-279, 275-301, 447-474, 470-496, 492-518, 519-547 and 543-572 of Seq ID No 999; 31-58, 54-80, 76-102, 166-196, 222-246, 242-266, 284-310, 306-332 and; 328-354 of Seq ID No 1000; 96-124 of Seq ID No 1042; 35-58, 54-77 and; 73-96 of Seq ID No 1001; 200-229, 225-253, 249-277, 495-522, 518-544 and 540-566 of Seq ID No 1002; 238-267, 268-300 and; 301-330 of Seq ID No 1003; 6-36, 32-62, 58-87, 210-237, 233-260, 256-282, 496-522, 518-543 and; 539-564 of Seq ID No 1004; 26-53, 468-501, 497-530, 49-76, 72-98, 235-268, 253-283, 279-309, 305-334, 425-455 and; 439-472 of Seq ID No 1005; 7-40 and; 36-69 of Seq ID No 1006; 11-38, 34-61, 57-84, 126-153, 149-176, 172-198, 265-290, 286-311 and 307-331 of Seq ID No 1045; 115-137 of Seq ID No 313; 11-35 of Seq ID No 1307; 1-25 of Seq ID No 1312; 8-32 of Seq ID No 1313; 5-29 of Seq ID No 1317; 10-34 of Seq ID No 1318; 82-106 of Seq ID No 1320; 3-27 of Seq ID No 1321; 9-33 of Seq ID No 1322;1-25 of Seq ID No 1323; 16-40 of Seq ID No 1324; 4-35 and 31-61 of Seq ID No 1325; 67-91 of Seq ID No 1326; 25-52 of Seq ID No 1327; 20-44 of Seq ID No 1329; 1-25 of Seq ID No 1330; 5-32 and 28-54 of Seq ID No 1331; 14-38 of Seq ID No 1332; 23-47 of Seq ID No 1333; 8-32 of Seq ID No 1334; 18-42 of Seq ID No 1335; 3-27 of Seq ID No 1336; 181-203 of Seq ID No 1203; 450-474 of Seq ID No 1204; 200-224, 220-245 and 241-266 of Seq ID No 1205; 50-79 and 75-104 of Seq ID No 1206; 195-219 of Seq ID No 1207; 26-53 and 49-77 of Seq ID No 1208; 107-136 and 132-162 of Seq ID No 1209; 197-221 of Seq ID No 1210; 10-34 of Seq ID No 1211; 48-80 and 76-107 of Seq ID No 1212; 159-191, 187-218, 434-464 and 460-489 of Seq ID No 1213; 66-90 of Seq ID No 1214; 51-75 and 666-690 of Seq ID No 1215; 99-123 of Seq ID No 1216; 251-275 of Seq ID No 1217; 115-137 of Seq ID No 313; 102-129 and 125-151 of Seq ID No 1218; 30-54 of Seq ID No 1219; 138-162 of Seq ID No 1220; 79-103 of Seq ID No 1221; 101-125 of Seq ID No 1222; 126-154, 150-178 and 174-202 of Seq ID No 1223; 322-346 of Seq ID No 1224; 418-442 of Seq ID No 1225; 126-156, 152-182, 178-208, 436-465, 461-489 and 485-513 of Seq ID No 1226; 42-75, 71-104, 134-161, 157-184, 181-209 and 205-233 of Seq ID No 1227; 131-155 and 262-286 of Seq ID No 1228; 43-69 and 65-90 of Seq ID No 1229; 468-492 of Seq ID No 1230; 90-115, 111-135, 131-155 and 151-175 of Seq ID No 1231; 495-522 and 518-545 of Seq ID No 1232; 45-72 and 68-95 of Seq ID No 1233; 94-121 and 117-144 of Seq ID No 1234; 8-32 and 337-361 of Seq ID No 1235; 943-973 and 969-1000 of Seq ID No 1236; 191-215 of Seq ID No 1237; 70-97 and 93-120 of Seq ID No 1238; 800-824, 820-844 and 840-864 of Seq ID No 1242; 115-137 of Seq ID No 313; 341-363, 359-381, 376-402, 398-424 and 420-445 of Seq ID No 1241; 186-216 of Seq ID No 1243; 103-127 of Seq ID No 1244; 19-50 and 46-77 of Seq ID No 1245; 80-107, 103-129 and 125-151 of Seq ID No 1246; 406-430 of Seq ID No 1247; 795-827 and 823-855 of Seq ID No 1248; 404-428 of Seq ID No 1249; 66-90, 86-110 and 106-130 of Seq ID No 1250; 107-131 of Seq ID No 1251; 524-548 of Seq ID No 1252; 193-217, 293-323, 319-349, 345-375 and 371-400 of Seq ID No 1253; 481-505 of Seq ID No 1254; 33-58 and 54-78 of Seq ID No 1255; 281-308, 304-331 and 327-354 of Seq ID No 1256; 321-352 of Seq ID No 1257; 174-198 of Seq ID No 1258; 248-273, 269-293 and 289-313 of Seq ID No 1259; 249-281 and 277-310 of Seq ID No 1260; 31-55 of Seq ID No 1261; 415-439, 540-566 and 562-589 of Seq ID No 1262; 213-237 of Seq ID No 1263; 243-267 of Seq ID No 1264; 545-583 of Seq ID No 1265; 73-97 and 240-264 of Seq ID No 1267; 115-137 of Seq ID No 313; 48-73, 69-93 and 89-113 of Seq ID No 1266; 9-33 of Seq ID No 1269; 375-399 of Seq ID No 1270; 335-359, 461-489, 485-513 and 509-536 of Seq ID No 1271; 30-62 and 58-90 of Seq ID No 1272; 581-605 of Seq ID No 1273; 101-131 and 127-157 of Seq ID No 1274; 317-349 and 345-377 of Seq ID No 1275; 534-558 of Seq ID No 1276; 108-133, 234-261, 257-284, 280-307 and 303-330 of Seq ID No 1277; 2-27, 23-48, 44-68, 82-106, 104-128, 152-176 and 373-397 of Seq ID No 1278; 324-348 of Seq ID No 1279; 196-223 and 219-246 of Seq ID No 1280; 263-294 and 291-323 of Seq ID No 1281; 183-207 of Seq ID No 1282; 176-200 of Seq ID No 1283; 297-321 of Seq ID No 1284; 91-115 of Seq ID No 1285; 11-41, 37-67 and 63-92 of Seq ID No 1286; 157-190 and 186-219 of Seq ID No 1287; 240-264 of Seq ID No 1288; 51-75 of Seq ID No 1289; 31-55 of Seq ID No 1290; 166-190 of Seq ID No 1291; 10-34 of Seq ID No 1293; 115-137 of Seq ID No 313; 554-579, 575-600, 596-621 and 617-642 of Seq ID No 1292; 200-226, 222-248 and 244 269 of Seq ID No 1295; 4-28 of Seq ID No 1296; 476-503 of Seq ID No 1297; 370-394 of Seq ID No 1298; 129-153 of Seq ID No 1299; 51-75 of Seq ID No 1301; 88-112 of Seq ID No 1302; 670-694 and 848-872 of Seq ID No 1303; 164-196, 703-731, 764-796, 792-823, 192-223, 219-250, 438-463, 459-483, 479-503, 629-658, 654-683 and 679-707 of Seq ID No 1306; 5-36 of Seq ID No 461; 32-51 of Seq ID No 463; 16-46 of Seq ID No 468; 12-33 and 27-48 of Seq ID No 469; 10-39 of Seq ID No 470; 27-56, 52-81, 77-105 and 101-129 of Seq ID No 471; 30-57, 53-80 and 76-102 of Seq ID No 472; 48-77 of Seq ID No 473; 6-35 of Seq ID No 474; 233-257, 253-277, 273-297 and; 293-317 of Seq ID No 301; 290-317 and; 367-388 of Seq ID No 303; 240-265 of Seq ID No 305; 796-824 of Seq ID No 306; 624-653 of Seq ID No 307; 36-64, 60-87, 83-110 and; 106-133 of Seq ID No 308; 120-148 of Seq ID No 309; 71-106 of Seq ID No 310; 741-764 and; 760-783 of Seq ID No 311; 450-483 of Seq ID No 314; 111-137 of Seq ID No 316; 896-923 of Seq ID No 317; 565-595 of Seq ID No 319; 178-204, 200-226, 222-248, 244-269 and 265-296 of Seq ID No 320; 1343-1369, 180-209, 205-233 and; 229-258 of Seq ID No 321; 242-270, 266-294 and; 290-318 of Seq ID No 322; 259-268 of Seq ID No 360; 278-305 of Seq ID No 312; 115-137 of Seq ID No 313; 89-116, 112-139 and; 135-162 of Seq ID No 326; 76-97 and; 93-114 of Seq ID No 329; 39-66, 62-88 and; 84-110 of Seq ID No 331; 244-274 of Seq ID No 333; 548-572 of Seq ID No 335; 165-200 of Seq ID No 336; 1-35 of Seq ID No 338; 662-695 of Seq ID No 339; 232-256 and; 252-283 of Seq ID No 342; 588-620 of Seq ID No 343; 197-229, 225-256 and; 252-283 of Seq ID No 345; 212-244, 240-272 and; 395-429 of Seq ID No 347; 209-230 of Seq ID No 348; 78-106 and 102-130 of Seq ID No 349; 118-142 of Seq ID No 350; 105-133, 129-156 and 152-180 of Seq ID No 351; 147-175 of Seq ID No 352; 16-44 of Seq ID No 353; 102-131 of Seq ID No 354; 328-355 of Seq ID No 355; 436-465 of Seq ID No 357; 139-166 of Seq ID No 363; 373-401 of Seq ID No 365; 114-148 of Seq ID No 367; 23-48, 44-70 and 71-99 of Seq ID No 369; 34-53 of Seq ID No 425; 164-193, 189-218 and 214-244 of Seq ID No 456; 1522-1552 of Seq ID No 431; 17-49 of Seq ID No 475; 122-149 of Seq ID No 459; 106-136 of Seq ID No 460; 26-51, 47-72 and 68-92 of Seq ID No 476; 187-208 and 204-224 of Seq ID No 477; 654-682 of Seq ID No 361; 944-970, 966-992 and 988-1015 of Seq ID No 364; 242-256 and 60-88 of Seq ID No 457; 96-124 of Seq ID No 1042; 550-575, 571-596 and 592-616 of Seq ID No 1031; 9-22 of Seq ID No 1032; 139-163, 159-183, 179-203, 199-220, 549-576, 572-599 and 595-622 of Seq ID No 1007; 70-88 of Seq ID No 302;134-147 of Seq ID No 303; 378-400 of Seq ID No 315; 3-19 of Seq ID No 318; 103-119 of Seq ID No 323; 266-292 of Seq ID No 324; 179-193 of Seq ID No 325; 282-296 of Seq ID No 327; 718-740 of Seq ID No 328; 1-29, 30-58 and 59-87 of Seq ID No 330; 54-69 of Seq ID No 332; 33-56 of Seq ID No 334; 71-84 of Seq ID No 340; 60-70 of Seq ID No 341; 17-41 of Seq ID No 344; 110-127 of Seq ID No 346; 101-122 of Seq ID No 356; 408-427 of Seq ID No 358; 42-61 of Seq ID No 359; 40-59 of Seq ID No 362; 178-193 of Seq ID No 366; 518-545 and 541-568 of Seq ID No 368; 564-591 of Seq ID No 368; 415-440, 436-461, 457-482 and 478-503 of Seq ID No 462; 1-29, 53-80, 76-103 and 99-126 of Seq ID No 464; 342-366, 362-386, 382-406 and 402-428 of Seq ID No 465; 342-369, 365-392, 388-415, 411-438, 434-461 and 457-484 of Seq ID No 466; 530-558, 554-582, 578-606 and 632-659 of Seq ID No 467; 34-42, 56-87, 95-133, 136-146, 157-213, 219-235, 246-282, 313-333, 358-394 and 196-215 of Seq ID No 1365; 67-74, 88-94, 112-118, 127-138, 155-169, 171-180, 183-190, 196-205, 243-249, 260-271, 308-344, 346-373, 381-414, 416-457, 473-513, 515-524, 528-535, 539-544, 556-566, 572-580, 585-590 and 27-129 of Seq ID No 1366; 4-16, 21-36, 38-47, 54-64, 92-103, 117-126, 135-155, 157-200, 202-223, 231-239, 246-262 and 128-153 of Seq ID No 1367; 4-10, 16-30 and 11-43 of Seq ID No 1369; 7-22, 52-77, 83-93, 101-111, 125-136, 139-157, 212-221, 231-239, 241-247, 264-273, 275-294, 329-336, 349-357, 365-379, 389-405, 419-434, 439-445, 456-462, 467-481, 493-506, 508-516, 522-545, 547-556, 566-583, 611-627, 655-670, 678-693, 717-724, 734-748, 756-766, 772-790, 797-808, 815-820, 825-831, 833-838, 851-868, 891-917, 919-926, 933-940, 944-953 and 246-271 of Seq ID No 1370; 4-12, 14-31, 42-59, 61-69, 73-83, 96-103, 140-149, 153-165, 180-187, 199-208, 222-230, 232-240, 248-254, 256-270, 274-283, 289-299, 302-317, 322-328, 332-345, 351-365, 387-396, 419-432, 441-447, 453-466, 487-505, 508-524, 560-571, 580-590, 592-605, 625-633, 639-647, 652-658, 671-679, 722-728 and 660-694 of Seq ID No 1371; 4-13, 26-39, 53-59, 68-74, 88-95, 102-119, 125-132, 136-150, 153-162, 165-175, 188-228, 238-245, 268-283, 285-307, 317-324, 326-343, 350-359 and 79-101 of Seq ID No 1372; 10-37, 55-68, 71-78, 92-98, 115-122, 131-138, 149-158, 163-170, 172-189, 212-219, 239-257, 259-271, 289-302, 304-320, 322-340, 359-366, 373-384, 400-412, 444-453, 460-474, 485-527 and 187-224 of Seq ID No 1373; 13-21, 27-36, 41-50, 55-64, 66-72, 74-90, 103-112, 127-136, 153-164, 166-186, 193-219, 224-242, 260-273, 278-294, 298-306, 328-334 and 142-171 of Seq ID No 1374; 16-29, 31-41, 49-61, 63-81, 86-92, 107-114, 122-135, 155-177, 195-211, 245-252, 264-270, 273-279, 297-322, 327-334, 339-348, 371-378, 380-389, 402-408, 414-421, 424-430, 452-459, 481-488, 500-506, 543-556, 567-573, 588-594, 608-615, 628-633, 668-675, 683-689, 700-706, 735-750, 793-802, 816-822, 841-846, 848-855, 858-864, 894-913, 921-929, 941-948, 974-990, 993-1005, 1053-1068, 1096-1110, 1117-1123, 1126-1145, 1149-1168, 1191-1203, 1219-1225, 1239-1248, 1253-1265, 1297-1309, 1356-1370, 1373-1379, 1388-1395 and 372-393 of Seq ID No 1375; 5-15, 29-37, 39-46, 51-60, 65-71, 73-97, 105-131, 137-152, 154-161, 173-185, 193-210, 214-222, 224-232, 241-255, 266-274, 277-289, 291-303, 307-338, 345-352, 358-371, 389-395, 402-422, 433-440, 444-465, 471-478, 498-513, 524-536, 542-558, 561-576, 584-602, 604-623, 631-639, 643-658, 667-683, 689-716 and 315-397 of Seq ID No 1376; 7-25, 30-37, 39-60, 69-86 and 75-89 of Seq ID No 1377; 16-30 of Seq ID No 1378; 8-27 of Seq ID No 1379; 4-22, 29-48, 50-58, 62-69, 71-78 and 6-36 of Seq ID No 1380; 4-23 and 3-24 of Seq ID No 1381; 4-12, 30-66 and 11-33 of Seq ID No 1382; 4-9, 40-64, 68-82 and 54-72 of Seq ID No 1383; 4-42 and 11-39 of Seq ID No 1384; 15-24, 77-88, 90-103, 116-123, 134-144 and 23-33 of Seq ID No 1385; 17-25, 47-56, 68-79 and 64-74 of Seq ID No 1386; 4-12, 14-21, 27-33 and 7-25 of Seq ID No 1387; 4-10, 25-37 and 5-23 of Seq ID No 1388; 4-9, 14-29, 38-44, 49-67, 69-97, 118-128, 135-146, 151-157, 159-172, 196-203, 227-241, 253-259, 262-271, 284-295, 299-309, 343-353, 356-362, 392-406, 410-416, 429-441, 463-478, 503-509 and 495-511 of Seq ID No 1389; 4-12, 24-33, 39-51, 57-63, 78-87 and 32-56 of Seq ID No 1390; 8-15, 29-40, 48-54 and 33-56 of Seq ID No 1391; 12-61 and 35-61 of Seq ID No 1392; 8-27 of Seq ID No 1393 and fragments comprising at least 6, preferably more than 8, especially more than 10 aa of said sequences. All these fragments individually and each independently form a preferred selected aspect of the present invention.

[0161] All linear hyperimmune serum reactive fragments of a particular antigen may be identified by analysing the entire sequence of the protein antigen by a set of peptides overlapping by 1 amino acid with a length of at least 10 amino acids. Subsequently, non-linear epitopes can be identified by analysis of the protein antigen with hyperimmune sera using the expressed full-length protein or domain polypeptides thereof. Assuming that a distinct domain of a protein is sufficient to form the 3D structure independent from the native protein, the analysis of the respective recombinant or synthetically produced domain polypeptide with hyperimmune serum would allow the identification of conformational epitopes within the individual domains of multi-domain proteins. For those antigens where a domain possesses linear as well as conformational epitopes, competition experiments with peptides corresponding to the linear epitopes may be used to confirm the presence of conformational epitopes.

[0162] It will be appreciated that the invention also relates to, among others, nucleic acid molecules encoding the aforementioned fragments, nucleic acid molecules that hybridise to nucleic acid molecules encoding the fragments, particularly those that hybridise under stringent conditions, and nucleic acid molecules, such as PCR primers, for amplifying nucleic acid molecules that encode the fragments. In these regards, preferred nucleic acid molecules are those that correspond to the preferred fragments, as discussed above.

[0163] The present invention also relates to vectors, which comprise a nucleic acid molecule or nucleic acid molecules of the present invention, host cells which are genetically engineered with vectors of the invention and the production of hyperimmune serum reactive antigens and fragments thereof by recombinant techniques.

[0164] A great variety of expression vectors can be used to express a hyperimmune serum reactive antigen or fragment thereof according to the present invention. Generally, any vector suitable to maintain, propagate or express nucleic adds to express a polypeptide in a host may be used for expression in this regard. In accordance with this aspect of the invention the vector may be, for example, a plasmid vector, a single or double-stranded phage vector, a single or double-stranded RNA or DNA viral vector. Starting plasmids disposed herein are either commercially available, publicly available, or cat be constructed from available plasmids by routine application of well-known, published procedures. Preferred among vectors, in certain respects, are those for expression of nucleic acid molecules and hyperimmune serum reactive antigens or fragments thereof of the present invention. Nucleic acid constructs in host cells can be used in a conventional manner to produce the gene product encoded by the recombinant sequence. Alternatively, the hyperimmune serum reactive antigens and fragments thereof of the invention can be synthetically produced by conventional peptide synthesizers. Mature proteins can be expressed in mammalian cells, yeast, bacteria, or other cells under the control of appropriate promoters. Cell-free translation systems can also be employed to produce such proteins using RNAs derived from the DNA construct of the present invention.

[0165] Host cells can be genetically engineered to incorporate nucleic acid molecules and express nucleic acid molecules of the present invention Representative examples of appropriate hosts include bacterial cells, such as streptococci, staphylococci, E. coli, Streptomyces and Bacillus subtillis cells; fungal cells, such as yeast cells and Aspergillus cells; insect cells such as Drosophila S2 and Spodoptera Sf9 cells; animal cells such as CHO, COS, Hela, C127, 3T3, BHK, 293 and Bowes melanoma cells; and plant cells.

[0166] The invention also provides a process for producing an enteroaggregative E. coli, enterotoxigenic E. coli, S. flexneri and/or C. jejuni hyperimmune serum reactive antigen and a fragment thereof comprising expressing from the host cell a hyperimmune serum reactive antigen or fragment thereof encoded by the nucleic add molecules provided by the present invention. The invention further provides a process for producing a cell, which expresses an enteroaggregative E. coli, enterotoxigenic E. coli, S. flexneri and/or C. jejuni hyperimmune serum reactive antigen or a fragment thereof comprising transforming or transfecting a suitable host cell with the vector according to the present invention such that the transformed or transfected cell expresses the polypeptide encoded by the nucleic acid contained in the vector.

[0167] The polypeptide may be expressed in a modified form, such as a fusion protein, and may include not only secretion signals but also additional heterologous functional regions. Thus, for instance, a region of additional amino adds, particularly charged amino acids, may be added to the N— or C-terminus of the polypeptide to improve stability and persistence in the host cell, during purification or during subsequent handling and storage. Also, regions may be added to the polypeptide to facilitate purification. Such regions may be removed prior to final preparation of the polypeptide. The addition of peptide moieties to polypeptides to engender secretion or excretion, to improve stability or to facilitate purification, among others, are familiar and routine techniques in the art. A preferred fusion protein comprises a heterologous region from immunoglobulin that is useful to solubilize or purify polypeptides. For example, BP-A-O 464 533 (Canadian counterpart 2045869) discloses fusion proteins comprising various portions of constant region of immunoglobin molecules together with another protein or part thereof In drug discovery, for example, proteins have been fused with antibody Fc portions for the purpose of high-throughout screening assays to identify antagonists. See for example, {Bennett, D. et al., 1995} and {Johanson, K. et al., 1995}.

[0168] The enteroaggregative E. coli, enterotoxigenic E. coli, S. flexneri or C. jejuni hyperimmune serum reactive antigen or a fragment thereof can be recovered and purified from recombinant cell cultures by well-known methods including ammonium sulfate or ethanol precipitation, acid extraction, anion or cation exchange chromatography, phosphocellulose chromatography, hydrophobic interaction chromatography, hydroxylapatite chromatography and lectin chromatography.

[0169] The hyperimmune serum reactive antigens and fragments thereof according to the present invention can be produced by chemical synthesis as well as by biotechnological means. The latter comprise the transfection or transformation of a host cell with a vector containing a nucleic acid according to the present invention and the cultivation of the transfected or transformed host cell under conditions, which are known to the ones skilled in the art. The production method may also comprise a purification step in order to purify or isolate the polypeptide to be manufactured. In a preferred embodiment the vector is a vector according to the present invention.

[0170] The hyperimmune serum reactive antigens and fragments thereof according to the present invention may be used for the detection of the organism or organisms in a sample containing these organisms or polypeptides derived thereof. Preferably such detection is for diagnosis, more preferable for the diagnosis of a disease, most preferably for the diagnosis of a diseases related or linked to the presence or abundance of Gram-negative bacteria, especially bacteria selected from the group comprising Escherichia, Shigella and Campylobacter. More preferably, the microorganisms are selected from the group comprising Escherichia coli, Shigella flexneri, Shigella sonnei, Shigella dysenteriae, Campylobacter coli and Campylobacter jejuni, especially the microorganism is enteroaggregative E. coli, enterotoxigenic E. coli, S. flexneri or C. jejuni.

[0171] The present invention also relates to diagnostic assays such as quantitative and diagnostic assays for detecting levels of the hyperimmune serum reactive antigens and fragments thereof of the present invention in cells and tissues, including determination of normal and abnormal levels. Thus, for instance, a diagnostic assay in accordance with the invention for detecting over-expression of the polypeptide compared to normal control tissue samples may be used to detect the presence of an infection, for example, and to identify the infecting organism. Assay techniques that can be used to determine levels of a polypeptide, in a sample derived from a host are well known to those of skill in the art. Such assay methods include radioimmunoassays, competitive-binding assays, Western Blot analysis and ELISA assays. Among these, ELISAs frequently are preferred. An ELISA assay initially comprises preparing an antibody specific to the polypeptide, preferably a monoclonal antibody. In addition, a reporter antibody generally is prepared which binds to the monoclonal antibody. The reporter antibody is attached to a detectable reagent such as radioactive, fluorescent or enzymatic reagent, such as horseradish peroxidase enzyme.

[0172] The hyperimmune serum reactive antigens and fragments thereof according to the present invention may also be used for the purpose of or in connection with an array. More particularly, at least one of the hyperimmune serum reactive antigens and fragments thereof according to the present invention may be immobilized on a support. Said support typically comprises a variety of hyperimmune serum reactive antigens and fragments thereof whereby the variety may be created by using one or several of the hyperimmune serum reactive antigens and fragments thereof according to the present invention and/or hyperimmune serum reactive antigens and fragments thereof being different. The characterizing feature of such array as well as of any array in general is the fact that at a distinct or predefined region or position on said support or a surface thereof, a distinct polypeptide is immobilized. Because of this any activity at a distinct position or region of an array can be correlated with a specific polypeptide. The number of different hyperimmune serum reactive antigens and fragments thereof immobilized on a support may range from as little as 10 to several 1,000 different hyperimmune serum reactive antigens and fragments thereof. The density of hyperimmune serum reactive antigens and fragments thereof per cm² is in a preferred embodiment as little as 10 peptides/polypeptides per cm² to at least 400 different peptides/polypeptides per cm² and more particularly at least 1,000 different hyperimmune serum reactive antigens and fragments thereof per cm².

[0173] The manufacture of such arrays is known to the one skilled in the art and, for example, described in U.S. Pat. No. 5,744,309. The array preferably comprises a planar, porous or non-porous solid support having at least a first surface. The hyperimmune serum reactive antigens and fragments thereof as disclosed herein, are immobilized on said surface. Preferred support materials are, among others, glass or cellulose. It is also within the present invention that the array is used for any of the diagnostic applications described herein. Apart from the hyperimmune serum reactive antigens and fragments thereof according to the present invention also the nucleic acid molecules according to the present invention may be used for the generation of an array as described above. This applies as well to an array made of antibodies, preferably monoclonal antibodies as, among others, described herein.

[0174] In a further aspect the present invention relates to an antibody directed to any of the hyperimmune serum reactive antigens and fragments thereof, derivatives or fragments thereof according to the present invention. The present invention includes, for example, monoclonal and polyclonal antibodies, chimeric, single chain, and humanized antibodies, as well as Fab fragments, or the product of a Fab expression library. It is within the present invention that the antibody may be chimeric, i.e. that different parts thereof stem from different species or at least the respective sequences are taken from different species.

[0175] Antibodies generated against the hyperimmune serum reactive antigens and fragments thereof corresponding to a sequence of the present invention can be obtained by direct injection of the hyperimmune serum reactive antigens and fragments thereof into an animal or by administering the hyperimmune serum reactive antigens and fragments thereof to an animal, preferably a non-human. The antibody so obtained will then bind the hyperimmune serum reactive antigens and fragments thereof itself. In this manner, even a sequence encoding only a fragment of a hyperimmune serum reactive antigen and fragments thereof can be used to generate antibodies binding the whole native hyperimmune serum reactive antigen and fragments thereof. Such antibodies can then be used to isolate the hyperimmune serum reactive antigens and fragments thereof from tissue expressing those hyperimmune serum reactive antigens and fragments thereof.

[0176] For preparation of monoclonal antibodies, any technique known in the art, which provides antibodies produced by continuous cell line cultures can be used (as described originally in {Kohler, G. et al., 1975}.

[0177] Techniques described for the production of single chain antibodies (U.S. Pat. No. 4,946,778) can be adapted to produce single chain antibodies to immunogenic hyperimmune serum reactive antigens and fragments thereof according to this invention. Also, transgenic mice, or other organisms such as other mammals, may be used to express humanized antibodies to immunogenic hyperimmune serum reactive antigens and fragments thereof according to this invention.

[0178] Alternatively, phage display technology or ribosomal display could be utilized to select antibody genes with binding activities towards the hyperimmune serum reactive antigens and fragments thereof either from repertoires of PCR amplified v-genes of lymphocytes from humans screened for possessing respective target antigens or from naive libraries {McCafferty, I. et al., 1990}; {Marks, J. et al., 1992}. The affinity of these antibodies can also be improved by chain shuffling {Clackson, T. et al, 1991}.

[0179] If two antigen binding domains are present, each domain may be directed against a different epitope—termed ‘bispecific’ antibodies.

[0180] The above-described antibodies may be employed to isolate or to identify clones expressing the hyperimmune serum reactive antigens and fragments thereof or purify the hyperimmune serum reactive antigens and fragments thereof of the present invention by attachment of the antibody to a solid support for isolation and/or purification by affinity chromatography.

[0181] Thus, among others, antibodies against the hyperimmune serum reactive antigens and fragments thereof of the present invention may be employed to inhibit and/or treat infections, particularly bacterial infections and especially infections arising from enteroaggregative E. coli, enterotoxigenic E. coli, S. flexneri and/or C. jejuni.

[0182] Hyperimmune serum reactive antigens and fragments thereof include antigenically, epitopically or immunologically equivalent derivatives, which form a particular aspect of this invention. The term “antigenically equivalent derivative” as used herein encompasses a hyperimmune serum reactive antigen and fragments thereof or its equivalent which will be specifically recognized by certain antibodies which, when raised to the protein or hyperimmune serum reactive antigen and fragments thereof according to the present invention, interfere with the interaction between pathogen and mammalian host. The term “immunologically equivalent derivative” as used herein encompasses a peptide or its equivalent which when used in a suitable formulation to raise antibodies in a vertebrate, the antibodies act to interfere with the interaction between pathogen and mammalian host

[0183] The hyperimmune serum reactive antigens and fragments thereof, such as an antigenically or immunologically equivalent derivative or a fusion protein thereof can be used as an antigen to immunize a mouse or other animal such as a rat or chicken. The fusion protein may provide stability to the hyperimmune serum reactive antigens and fragments thereof. The antigen may be associated, for example by conjugation, with an immunogenic carrier protein, for example bovine serum albumin (BSA) or keyhole limpet haemocyanin (KLH). Alternatively, an antigenic peptide comprising multiple copies of the protein or hyperimmune serum reactive antigen and fragments thereof, or an antigenically or immunologically equivalent hyperimmune serum reactive antigen and fragments thereof, may be sufficiently antigenic to improve immunogenicity so as to obviate the use of a carrier.

[0184] Preferably the antibody or derivative thereof is modified to make it less immunogenic in the individual. For example, if the individual is human the antibody may most preferably be “humanized”, wherein the complimentarity determining region(s) of the hybridoma-derived antibody has been transplanted into a human monoclonal antibody, for example as described in {Jones, P. et al., 1986} or {Tempest, P. et al., 1991}.

[0185] The use of a polynucleotide of the invention in genetic immunization will preferably employ a suitable delivery method such as direct injection of plasmid DNA into muscle, delivery of DNA complexed with specific protein carriers, coprecipitation of DNA with calcium phosphate, encapsulation of DNA in various forms of liposomes, particle bombardment {Tang, D. et al., 1992}, {Eisenbraun, M. et al., 1993} and in vivo infection using cloned retroviral vectors {Seeger, C. et al., 1984}.

[0186] In a further aspect the present invention relates to a peptide binding to any of the hyperimmune serum reactive antigens and fragments thereof according to the present invention, and a method for the manufacture of such peptides whereby the method is characterized by the use of the hyperimmune serum reactive antigens and fragments thereof according to the present invention and the basic steps are known to the one skilled in the art.

[0187] Such peptides may be generated by using methods according to the state of the art such as phage display or ribosome display. In case of phage display, basically a library of peptides is generated, in form of phages, and this kind of library is contacted with the target molecule, in the present case a hyperimmune serum reactive antigen and fragments thereof according to the present invention. Those peptides binding to the target molecule are subsequently removed, preferably as a complex with the target molecule, from the respective reaction It is known to the one skilled in the art that the binding characteristics, at least to a certain extent, depend on the particularly realized experimental set-up such as the salt concentration and the like. After separating those peptides binding to the target molecule with a higher affinity or a bigger force, from the non-binding members of the library, and optionally also after removal of the target molecule from the complex of target molecule and peptide, the respective peptide(s) may subsequently be characterised. Prior to the characterisation optionally an amplification step is realized such as, e.g. by propagating the peptide encoding phages. The characterisation preferably comprises the sequencing of the target binding peptides. Basically, the peptides are not limited in their lengths, however preferably peptides having a length from about 8 to 20 amino acids are preferably obtained in the respective methods. The size of the libraries may be about 10² to 10¹⁸, preferably 10⁸ to 10¹⁵ different peptides, however, is not limited thereto.

[0188] A particular form of target binding hyperimmune serum reactive antigens and fragments thereof are the so-called “anticalines” which are, among others, described in German patent application DE 197 42 706.

[0189] In a further aspect the present invention relates to functional nucleic acids interacting with any of the hyperimmune serum reactive antigens and fragments thereof according to the present invention, and a method for the manufacture of such functional nucleic acids whereby the method is characterized by the use of the hyperimmune serum reactive antigens and fragments thereof according to the present invention and the basic steps are known to the one skilled in the art. The functional nucleic acids are preferably aptamers and spiegelmers.

[0190] Aptamers are D-nucleic acids, which are either single stranded or double stranded and which specifically interact with a target molecule. The manufacture or selection of aptamers is, e.g. described in European patent EP 0 533 838. Basically the following steps are realized. First, a mixture of nucleic acids, i.e. potential aptamers, is provided whereby each nucleic acid typically comprises a segment of several, preferably at least eight subsequent randomised nucleotides. This mixture is subsequently contacted with the target molecule whereby the nucleic acid(s) bind to the target molecule, such as based on an increased affinity towards the target or with a bigger force thereto, compared to the candidate mixture. The binding nucleic acid(s) are/is subsequently separated from the remainder of the mixture. Optionally, the thus obtained nucleic acid(s) is amplified using, e.g. polymerase chain reaction. These steps may be repeated several times giving at the end a mixture having an increased ratio of nucleic acids specifically binding to the target from which the final binding nucleic add is then optionally selected. These specifically binding nucleic acid(s) are referred to as aptamers. It is obvious that at any stage of the method for the generation or identification of the aptamers samples of the mixture of individual nucleic acids may be taken to determine the sequence thereof using standard techniques. It is within the present invention that the aptamers may be stabilized such as, e.g., by introducing defined chemical groups which are known to the one skilled in the art of generating aptamers. Such modification may for example reside in the introduction of an amino group at the 2′-position of the sugar moiety of the nucleotides. Aptamers are currently used as therapeutical agents. However, it is also within the present invention that the thus selected or generated aptamers may be used for target validation and/or as lead substance for the development of medicaments, preferably of medicaments based on small molecules. This is actually done by a competition assay whereby the specific interaction between the target molecule and the aptamer is inhibited by a candidate drug whereby upon replacement of the aptamer from the complex of target and aptamer it may be assumed that the respective drug candidate allows a specific inhibition of the interaction between target and aptamer, and if the interaction is specific, said candidate drug will, at least in principle, be suitable to block the target and thus decrease its biological availability or activity in a respective system comprising such target. The thus obtained small molecule may then be subject to further derivatisation and modification to optimise its physical, chemical, biological and/or medical characteristics such as toxicity, specificity, biodegradability and bioavailability.

[0191] Spiegelmers and their generation or manufacture is based on a similar principle. The manufacture of spiegelmers is described in international patent application WO 98/08856. Spiegelmers are L-nucleic acids, which means that they are composed of L-nucleotides rather than D-nucleotides as aptamers are. Spiegelmers are characterized by the fact that they have a very high stability in biological systems and, comparable to aptamers, specifically interact with the target molecule against which they are directed. In the process of generating spiegelmers, a heterogeonous population of D-nucleic acids is created and this population is contacted with the optical antipode of the target molecule, in the present case for example with the D-enantiomer of the naturally occurring L-enantiomer of the hyperimmune serum reactive antigens and fragments thereof according to the present invention. Subsequently, those D-nucleic adds are separated which do not interact with the optical antipode of the target molecule. But those D-nucleic adds interacting with the optical antipode of the target molecule are separated, optionally identified and/or sequenced and subsequently the corresponding L-nucleic acids are synthesized based on the nucleic acid sequence information obtained from the D-nucleic acids. These L-nucleic acids, which are identical in terms of sequence with the aforementioned D-nucleic adds interacting with the optical antipode of the target molecule, will specifically interact with the naturally occurring target molecule rather than with the optical antipode thereof. Similar to the method for the generation of aptamers it is also possible to repeat the various steps several times and thus to enrich those nucleic acids specifically interacting with the optical antipode of the target molecule.

[0192] In a further aspect the present invention relates to functional nucleic adds interacting with any of the nucleic acid molecules according to the present invention, and a method for the manufacture of such functional nucleic acids whereby the method is characterized by the use of the nucleic acid molecules and their respective sequences according to the present invention and the basic steps are known to the one skilled in the art. The functional nucleic acids are preferably ribozymes, antisense oligonucleotides and siRNA.

[0193] Ribozymes are catalytically active nucleic adds, which preferably consist of RNA, which basically comprises two moieties. The first moiety shows a catalytic activity whereas the second moiety is responsible for the specific interaction with the target nucleic acid, in the present case the nucleic acid coding for the hyperimmune serum reactive antigens and fragments thereof according to the present invention. Upon interaction between the target nucleic acid and the second moiety of the ribozyme, typically by hybridisation and Watson-Crick base pairing of essentially complementary stretches of bases on the two hybridising strands, the catalytically active moiety may become active which means that it catalyses, either intramolecularly or intermolecularly, the target nucleic acid in case the catalytic activity of the ribozyme is a phosphodiesterase activity. Subsequently, there may be a further degradation of the target nucleic acid, which in the end results in the degradation of the target nucleic acid as well as the protein derived from the said target nucleic acid. Ribozymes, their use and design principles are known to the one skilled in the art, and, for example described in {Doherty, E. et al. 2001} and {Lewin, A. et al., 2001}.

[0194] The activity and design of antisense oligonucleotides for the manufacture of a medicament and as a diagnostic agent, respectively, is based on a similar mode of action. Basically, antisense oligonucleotides hybridise based on base complementarity, with a target RNA, preferably with a mRNA, thereby activating RNase H. RNase H is activated by both phosphodiester and phosphorothioate-coupled DNA. Phosphodiester-coupled DNA, however, is rapidly degraded by cellular nucleases with the exception of phosphorothioate-coupled DNA. These resistant, non-naturally occurring DNA derivatives do not inhibit RNase H upon hybridisation with RNA. In other words, antisense polynudeotides are only effective as DNA RNA hybride complexes. Examples for this kind of antisense oligonucleotides are described, among others, in U.S. Pat. No. 5,849,902 and U.S. Pat. No. 5,989,912. In other words, based on the nucleic acid sequence of the target molecule which in the present case are the nucleic acid molecules for the hyperimmune serum reactive antigens and fragments thereof according to the present invention, either from the target protein from which a respective nucleic acid sequence may in principle be deduced, or by knowing the nucleic acid sequence as such, particularly the mRNA, suitable antisense oligonucleotides may be designed base on the principle of base complementarity.

[0195] Particularly preferred are antisense-oligonucleotides, which have a short stretch of phosphorothioate DNA (3 to 9 bases). A minimum of 3 DNA bases is required for activation of bacterial RNase H and a minimum of 5 bases is required for mammalian RNase H activation. In these chimeric oligonudeotides there is a central region that forms a substrate for RNase H that is flanked by hybridising “arms” comprised of modified nucleotides that do not form substrates for RNase H. The hybridising arms of the chimeric oligonucleotides may be modified such as by 2′-O-methyl or 2′-fluoro. Alternative approaches used methylphosphonate or phosphoramidate linkages in said arms. Further embodiments of the antisense oligonudeotide useful in the practice of the present invention are P-methoxyoligonucleotides, partial P-methoxyoligodeoxyribonudeotides or P-methoxyoligonudeotides.

[0196] Of particular relevance and usefulness for the present invention are those antisense oligonudeotides as more particularly described in the above two mentioned US patents. These oligonudeotides contain no naturally occurring 5′→3′-linked nucleotides. Rather the oligonudeotides have two types of nucleotides: 2′-deoxyphosphorothioate, which activate RNase H, and 2′-modified nucleotides, which do not. The linkages between the 2′-modified nucleotides can be phosphodiesters, phosphorothioate or P-ethoxyphosphodiester. Activation of RNase H is accomplished by a contiguous RNase H-activating region, which contains between 3 and 5 2′-deoxyphosphorothioate nucleotides to activate bacterial RNase H and between 5 and 10 2′- deoxyphosphorothioate nucleotides to activate eucaryotic and, particularly, mammalian RNase H. Protection from degradation is accomplished by making the 5′ and 3′ terminal bases highly nuclease resistant and, optionally, by placing a 3′ terminal blocking group.

[0197] More particularly, the antisense oligonucleotide comprises a 5′ terminus and a 3′ terminus; and from position 11 to 59 5′→3′-linked nucleotides independently selected from the group consisting of 2′-modified phosphodiester nucleotides and 2′-modified P-alkyloxyphosphotriester nucleotides; and wherein the 5′-terminal nucleoside is attached to an RNase H-activating region of between three and ten contiguous phosphorothioate4inked deoxyribonucleotides, and wherein the 3′-terminus of said oligonucleotide is selected from the group consisting of an inverted deoxyribonucleotide, a contiguous stretch of one to three phosphorothioate 2′-modified ribonucleotides, a biotin group and a P-alkyloxyphosphotriester nucleotide.

[0198] Also an antisense oligonudeotide may be used wherein not the 5′ terminal nucleoside is attached to an RNase H-activating region but the 3′ terminal nucleoside as specified above. Also, the 5′ terminus is selected from the particular group rather than the 3′ terminus of said oligonudeotide.

[0199] The nucleic acids as well as the hyperimmune serum reactive antigens and fragments thereof according to the present invention may be used as or for the manufacture of pharmaceutical compositions, especially vaccines. Preferably such pharmaceutical composition, preferably vaccine is for the prevention or treatment of diseases caused by, related to or associated with enteroaggregative E. coli, enterotoxigenic E. coli, S. flexneri and/or C. jejuni. In so far another aspect of the invention relates to a method for inducing an immunological response in an individual, particularly a mammal, which comprises inoculating the individual with the hyperimmune serum reactive antigens and fragments thereof of the invention, or a fragment or variant thereof, adequate to produce antibodies to protect said individual from infection, particularly an infection causing diarrhea among other symptoms and most particularly enteroaggregative E. coli, enterotoxigenic E. coli, S. flexneri and/or C. jejuni infections.

[0200] Yet another aspect of the invention relates to a method of inducing an immunological response in an individual which comprises, through gene therapy or otherwise, delivering a nucleic acid functionally encoding hyperimmune serum reactive antigens and fragments thereof, or a fragment or a variant thereof, for expressing the hyperimmune serum reactive antigens and fragments thereof, or a fragment or a variant thereof in vivo in order to induce an immunological response to produce antibodies or a cell mediated T cell response, either cytokine-producing T cells or cytotoxic T cells, to protect said individual from disease, whether that disease is already established within the individual or not. One-way of administering the gene is by accelerating it into the desired cells as a coating on particles or otherwise.

[0201] A further aspect of the invention relates to an immunological composition which, when introduced into a host capable of having induced within it an immunological response, induces an immunological response in such host, wherein the composition comprises recombinant DNA which codes for and expresses an antigen of the hyperimmune serum reactive antigens and fragments thereof of the present invention. The immunological response may be used therapeutically or prophylactically and may take the form of antibody immunity or cellular immunity such as that arising from CTh or CD4+ T cells.

[0202] The hyperimmune serum reactive antigens and fragments thereof of the invention or a fragment thereof may be fused with a co-protein which may not by-itself produce antibodies, but is capable of stabilizing the first protein and producing a fused protein which will have immunogenic and protective properties. This fused recombinant protein preferably further comprises an antigenic co-protein, such as Glutathione-S-transferase (GST) or beta-galactosidase, relatively large co-proteins which solubilise the protein and facilitate production and purification thereof. Moreover, the co-protein may act as an adjuvant in the sense of providing a generalized stimulation of the immune system. The co-protein may be attached to either the amino or carboxy terminus of the first protein.

[0203] Also, provided by this invention are methods using the described nucleic acid molecule or particular fragments thereof in such genetic immunization experiments in animal models of infection with enteroaggregative E. coli, enterotoxigenic E. coli, S. flexneri and/or C. jejuni. Such fragments will be particularly useful for identifying protein epitopes able to provoke a prophylactic or therapeutic immune response. This approach can allow for the subsequent preparation of monoclonal antibodies of particular value from the requisite organ of the animal successfully resisting or clearing infection for the development of prophylactic agents or therapeutic treatments of enteroaggregative E. coli, enterotoxigenic E. coli, S. flexneri and/or C. jejuni infection in mammals, particularly humans.

[0204] The hyperimmune serum reactive antigens and fragments thereof may be used as an antigen for vaccination of a host to produce specific antibodies which protect against invasion of bacteria, for example by blocking adherence of bacteria to damaged tissue. Examples of tissue damage include wounds in skin or connective tissue and mucosal tissues caused e.g. by viral infection (esp. respiratory, such as the flu) mechanical, chemical or thermal damage or by implantation of indwelling devices, or wounds in the mucous membranes, such as the mouth, mammary glands, urethra or vagina.

[0205] The present invention also includes a vaccine formulation, which comprises the immunogenic recombinant protein together with a suitable carrier. Since the protein may be broken down in the stomach, it is preferably administered parenterally, including, for example, administration that is subcutaneous, intramuscular, intravenous, intradermal intranasal or transdermal. Formulations suitable for parenteral administration include aqueous and non-aqueous sterile injection solutions which may contain anti-oxidants, buffers, bacteriostats and solutes which render the formulation isotonic with the bodily fluid, preferably the blood, of the individual; and aqueous and non-aqueous sterile suspensions which may include suspending agents or thickening agents. The formulations may be presented in unit-dose or multi-dose containers, for example, sealed ampoules and vials, and may be stored in a freeze-dried condition requiring only the addition of the sterile liquid carrier immediately prior to use. The vaccine formulation may also include adjuvant systems for enhancing the immunogenicity of the formulation, such as oil-in-water systems and other systems known in the art. The dosage will depend on the specific activity of the vaccine and can be readily determined by routine experimentation.

[0206] According to another aspect, the present invention relates to a pharmaceutical composition comprising such a hyperimmune serum-reactive antigen or a fragment thereof as provided in the present invention for enteroaggregative E. coli, enterotoxigenic E. coli, S. flexneri and/or C. jejune. Such a pharmaceutical composition may comprise one preferably at least two or more hyperimmune serum reactive antigens or fragments thereof against enteroaggregative E. coli, enterotoxigenic E. coli, S. flexneri and/or C. jejuni. Optionally, such enteroaggregative E. coli, enterotoxigenic E. coli, S. flexneri and/or C. jejuni hyperimmune serum reactive antigens or fragments thereof may also be combined with antigens against even further pathogens in a combination pharmaceutical composition. Preferably, said pharmaceutical composition is a vaccine for preventing or treating an infection caused by enteroaggregative E coli, enterotoxigenic E. coli, S. flexneri and/or C. jejuni and/or other pathogens against which the antigens have been included in the vaccine.

[0207] According to a further aspect, the present invention relates to a pharmaceutical composition comprising a nucleic acid molecule encoding a hyperimmune serum-reactive antigen or a fragment thereof as identified above for enteroaggregative E. coli, enterotoxigenic E. coli, S. flexneri and/or C. jejuni. Such a pharmaceutical composition may comprise one or more nucleic acid molecules encoding hyperimmune serum reactive antigens or fragments thereof against enteroaggregative E. coli, enterotoxigenic E. coli, S. flexneri and/or C. jejuni. Optionally, such enteroaggregative E. coli, enterotoxigenic E. coli, S. flexneri and/or C. jejuni nucleic acid molecules encoding hyperimmune serum reactive antigens or fragments thereof may also be combined with nucleic acid molecules encoding antigens against other pathogens in a combination pharmaceutical composition. Preferably, said pharmaceutical composition is a vaccine for preventing or treating an infection caused by enteroaggregative E. coli, enterotoxigenic E. coli, S. flexneri and/or C. jejuni and/or other pathogens against which the antigens have been included in the vaccine.

[0208] The pharmaceutical composition may contain any suitable auxiliary substances, such as buffer substances, stabilisers or further active ingredients, especially ingredients known in connection of pharmaceutical composition and/or vaccine production.

[0209] A preferable carrier/or excipient for the hyperimmune serum-reactive antigens, fragments thereof or a coding nucleic acid molecule thereof according to the present invention is an immunostimulatory compound for further stimulating the immune response to the given hyperimmune serum-reactive antigen, fragment thereof or a coding nucleic acid molecule thereof. Preferably the immunostimulatory compound in the pharmaceutical preparation according to the present invention is selected from the group of polycationic substances, especially polycationic peptides, immunostimulatory nucleic acids molecules, preferably immunostimulatory deoxynucleotides, alum, Freund's complete adjuvants, Freund's incomplete adjuvants, neuroactive compounds, especially human growth hormone, or combinations thereof.

[0210] It is also within the scope of the present invention that the pharmaceutical composition, especially vaccine, comprises apart from the hyperimmune serum reactive antigens, fragments thereof and/or coding nucleic acid molecules thereof according to the present invention other compounds which are biologically or pharmaceutically active. Preferably, the vaccine composition comprises at least one polycationic peptide. The polycationic compound(s) to be used according to the present invention may be any polycationic compound, which shows the characteristic effects according to the WO 97/30721. Preferred polycationic compounds are selected from basic polypeptides, organic polycations, basic polyamino acids or mixtures thereof. These polyamino acids should have a chain length of at least 4 amino acid residues (WO 97/30721). Especially preferred are substances like polylysine, polyarginine and polypeptides containing more than 20%, especially more than 50% of basic amino acids in a range of more than 8, especially more than 20, amino acid residues or mixtures thereof. Other preferred polycations and their pharmaceutical compositions are described in WO 97/30721 (e.g. polyethyleneimine) and WO 99/38528. Preferably these polypeptides contain between 20 and 500 amino acid residues, especially between 30 and 200 residues.

[0211] These polycationic compounds may be produced chemically or recombinantly or may be derived from natural sources.

[0212] Cationic (poly)peptides may also be anti-microbial with properties as reviewed in {Ganz, T., 1999}. These (poly)peptides may be of prokaryotic or animal or plant origin or may be produced chemically or recombinantly (WO 02/13857). Peptides may also belong to the class of defensins (WO 02/13857). Sequences of such peptides can be, for example, found in the Antimicrobial Sequences Database under the following internet address:
[0213] http://www.bbcm.univ.trieste.it/˜tossi/pag2.html

[0214] Such host defence peptides or defensives are also a preferred form of the polycationic polymer according to the present invention. Generally, a compound allowing as an end product activation (or down-regulation) of the adaptive immune system, preferably mediated by APCs (including dendritic cells) is used as polycationic polymer.

[0215] Especially preferred for use as polycationic substances in the present invention are cathelicidin derived antimicrobial peptides or derivatives thereof (International patent application WO 02/13857, incorporated herein by reference), especially antimicrobial peptides derived from mammalian cathelicidin, preferably from human, bovine or mouse.

[0216] Polycationic compounds derived from natural sources include HIV-REV or HIV-TAT (derived cationic peptides, antennapedia peptides, chitosan or other derivatives of chitin) or other peptides derived from these peptides or proteins by biochemical or recombinant production. Other preferred polycationic compounds are cathelin or related or derived substances from cathelin. For example, mouse cathelin is a peptide, which has the amino acid sequence NH₂-RLAGLLRKGGEKIGEKLKKIGOKIKNFFQKLVPQPE-COOH. Related or derived cathelin substances contain the whole or parts of the cathelin sequence with at least 15-20 amino add residues. Derivations may include the substitution or modification of the natural amino acids by amino acids, which are not among the 20 standard amino adds. Moreover, further cationic residues may be introduced into such cathelin molecules. These cathelin molecules are preferred to be combined with the antigen. These cathelin molecules surprisingly have turned out to be also effective as an adjuvant for an antigen without the addition of further adjuvants. It is therefore possible to use such cathelin molecules as efficient adjuvants in vaccine formulations with or without further immunactivating substances.

[0217] Another preferred polycationic substance to be used according to the present invention is a synthetic peptide containing at least 2 KLK-motifs separated by a linker of 3 to 7 hydrophobic amino acids (International patent application WO 02/32451, incorporated herein by reference).

[0218] The pharmaceutical composition of the present invention may further comprise immunostimulatory nucleic acid(s). Immunostimulatory nucleic adds are e.g. neutral or artificial CpG containing nucleic acids, short stretches of nucleic acids derived from non-vertebrates or in form of short oligonucleotides (ODNs) containing non-methylated cytosine-guanine di-nucleotides (CpG) in a certain base context (e.g. described in WO 96/02555). Alternatively, also nucleic acids based on inosine and cytidine as e.g. described in the WO 01/93903, or deoxynucleic acids containing deoxy-inosine and/or deoxyuridine residues (described in WO 01/93905 and PCT/EP 02/05448, incorporated herein by reference) may preferably be used as immunostimulatory nucleic acids for the present invention. Preferablly, the mixtures of different immunostimulatory nucleic acids may be used according to the present invention.

[0219] It is also within the present invention that any of the aforementioned polycationic compounds is combined with any of the immunostimulatory nucleic acids as aforementioned. Preferably, such combinations are according to the ones as described in WO 01/93905, WO 02/32451, WO 01/54720, WO 01/93903, WO 02/13857 and PCT/EP 02/05448 and the Austrian patent application A 1924/2001, incorporated herein by reference.

[0220] In addition or alternatively such vaccine composition may comprise apart from the hyperimmune serum reactive antigens and fragments thereof, and the coding nucleic add molecules thereof according to the present invention a neuroactive compound. Preferably, the neuroactive compound is human growth factor as, e.g. described in WO 01/24822. Also preferably, the neuroactive compound is combined with any of the polycationic compounds and/or immunostimulatory nucleic acids as afore-mentioned.

[0221] In a further aspect the present invention is related to a pharmaceutical composition. Such pharmaceutical composition is, for example, the vaccine described herein. Also a pharmaceutical composition is a pharmaceutical composition which comprises any of the following compounds or combinations thereof the nucleic acid molecules according to the present invention, the hyperimmune serum reactive antigens and fragments thereof according to the present invention, the vector according to the present invention, the cells according to the present invention, the antibody according to the present invention, the functional nucleic adds according to the present invention and the binding peptides such as the anticalines according to the present invention, any agonists and antagonists screened as described herein. In connection therewith any of these compounds may be employed in combination with a non-sterile or sterile carrier or carriers for use with cells, tissues or organisms, such as a pharmaceutical carrier suitable for administration to a subject. Such compositions comprise, for instance, a media additive or a therapeutically effective amount of a hyperimmune serum reactive antigen and fragments thereof of the invention and a pharmaceutically acceptable carrier or excipient. Such carriers may include, but are not limited to, saline, buffered saline, dextrose, water, glycerol, ethanol and combinations thereof. The formulation should suit the mode of administration.

[0222] The pharmaceutical compositions may be administered in any effective, convenient manner including, for instance, administration by topical, oral, anal, vaginal, intravenous, intraperitoneal, intramuscular, subcutaneous, intranasal, intratracheal or intradermal routes among others.

[0223] In therapy or as a prophylactic, the active agent may be administered to an individual as an injectable composition, for example as a sterile aqueous dispersion, preferably isotonic.

[0224] Alternatively the composition may be formulated for topical application, for example in the form of ointments, creams, lotions, eye ointments, eye drops, ear drops, mouthwash, impregnated dressings and sutures and aerosols, and may contain appropriate conventional additives, including, for example, preservatives, solvents to assist drug penetration, and emollients in ointments and creams. Such topical formulations may also contain compatible conventional carriers, for example cream or ointment bases, and ethanol or oleyl alcohol for lotions. Such carriers may constitute from about 1% to about 98% by weight of the formulation; more usually they will constitute up to about 80% by weight of the formulation.

[0225] In addition to the therapy described above, the compositions of this invention may be used generally as a wound treatment agent to prevent adhesion of bacteria to matrix proteins exposed in wound tissue and for prophylactic use in dental treatment as an alternative to, or in conjunction with, antibiotic prophylaxis.

[0226] A vaccine composition is conveniently in injectable form. Conventional adjuvants may be employed to enhance the immune response. A suitable unit dose for vaccination is 0.05-5 μg antigen/per kg of body weight, and such dose is preferably administered 1-3 times and with an interval of 1-3 weeks.

[0227] With the indicated dose range, no adverse toxicological effects should be observed with the compounds of the invention, which would preclude their administration to suitable individuals.

[0228] In a further embodiment the present invention relates to diagnostic and pharmaceutical packs and kits comprising one or more containers filled with one or more of the ingredients of the aforementioned compositions of the invention. The ingredient(s) can be present in a useful amount, dosage, formulation or combination. Associated with such container(s) can be a notice in the form prescribed by a governmental agency regulating the manufacture, use or sale of pharmaceuticals or biological products, reflecting approval by the agency of the manufacture, use or sale of the product for human administration.

[0229] In connection with the present invention any disease related use as disclosed herein such as, e.g. use of the pharmaceutical composition or vaccine, is particularly a disease or diseased condition which is caused by, linked or associated with Escherichia, Shigella and Campylobacter, more preferably, enteroaggregative E. coli, enterotoxigenic E. coli, S. flexneri and/or C. jejuni. In connection therewith it is to be noted that enteroaggregative E. coli, enterotoxigenic E. coli, S. flexneri and C. jejuni all comprise several strains including those disclosed herein. A disease related, caused or associated with the bacterial infection to be prevented and/or treated according to the present invention includes besides others diarrheal disease, shigellosis and Guillain-Barre syndrom.

[0230] In a still further embodiment the present invention is related to a screening method using any of the hyperimmune serum reactive antigens or nucleic acids according to the present invention. Screening methods as such are known to the one skilled in the art and can be designed such that an agonist or an antagonist is screened. Preferably an antagonist is screened which in the present case inhibits or prevents the binding of any hyperimmune serum reactive antigen and fragment thereof according to the present invention to an interaction partner. Such interaction partner can be a naturally occurring interaction partner or a non-naturally occurring interaction partner.

[0231] The invention also provides a method of screening compounds to identify those, which enhance (agonist) or block (antagonist) the function of hyperimmune serum reactive antigens and fragments thereof or nucleic acid molecules of the present invention, such as its interaction with a binding molecule. The method of screening may involve high-throughput.

[0232] For example, to screen for agonists or antagonists, the interaction partner of the nucleic acid molecule and nucleic acid, respectively, according to the present invention, maybe a synthetic reaction mix, a cellular compartment, such as a membrane, cell envelope or cell wall, or a preparation of any thereof, may be prepared from a cell that expresses a molecule that binds to the hyperimmune serum reactive antigens and fragments thereof of the present invention. The preparation is incubated with labelled hyperimmune serum reactive antigens and fragments thereof in the absence or the presence of a candidate molecule, which may be an agonist or antagonist. The ability of the candidate molecule to bind the binding molecule is reflected in decreased binding of the labelled ligand. Molecules which bind gratuitously, i.e., without inducing the functional effects of the hyperimmune serum reactive antigens and fragments thereof, are most likely to be good antagonists. Molecules that bind well and elicit functional effects that are the same as or closely related to the hyperimmune serum reactive antigens and fragments thereof are good agonists.

[0233] The functional effects of potential agonists and antagonists may be measured, for instance, by determining the activity of a reporter system following interaction of the candidate molecule with a cell or appropriate cell preparation, and comparing the effect with that of the hyperimmune serum reactive antigens and fragments thereof of the present invention or molecules that elicit the same effects as the hyperimmune serum reactive antigens and fragments thereof. Reporter systems that may be useful in this regard include but are not limited to colorimetric labelled substrate converted into product, a reporter gene that is responsive to changes in the functional activity of the hyperimmune serum reactive antigens and fragments thereof, and binding assays known in the art.

[0234] Another example of an assay for antagonists is a competitive assay that combines the hyperimmune serum reactive antigens and fragments thereof of the present invention and a potential antagonist with membrane-bound binding molecules, recombinant binding molecules, natural substrates or ligands, or substrate or ligand mimetics, under appropriate conditions for a competitive inhibition assay. The hyperimmune serum reactive antigens and fragments thereof can be labelled such as by radioactivity or a colorimetric compound, such that the molecule number of hyperimmune serum reactive antigens and fragments thereof bound to a binding molecule or converted to product can be determined accurately to assess the effectiveness of the potential antagonist.

[0235] Potential antagonists include small organic molecules, peptides, polypeptides and antibodies that bind to a hyperimmune serum reactive antigen and fragments thereof of the invention and thereby inhibit or extinguish its acitivity. Potential antagonists also may be small organic molecules, a peptide, a polypeptide such as a closely related protein or antibody that binds to the same sites on a binding molecule without inducing functional activity of the hyperimmune serum reactive antigens and fragments thereof of the invention.

[0236] Potential antagonists include a small molecule, which binds to and occupies the binding site of the hyperimmune serum reactive antigens and fragments thereof thereby preventing binding to cellular binding molecules, such that normal biological activity is prevented. Examples of small molecules include but are not limited to small organic molecules, peptides or peptide-like molecules.

[0237] Other potential antagonists include antisense molecules (see {Okano, H. et al., 1991}; OLIGODEOXYNUCLEOTIDES AS ANTISENSE INHIBITORS OF GENE EXPRESSION; CRC Press, Boca Raton, Fla. (1988), for a description of these molecules).

[0238] Preferred potential antagonists include derivatives of the hyperimmune serum reactive antigens and fragments thereof of the invention.

[0239] As used herein the activity of a hyperimmune serum reactive antigen and fragment thereof according to the present invention is its capability to bind to any of its interaction partner or the extent of such capability to bind to its or any interaction partner.

[0240] In a particular aspect, the invention provides the use of the hyperimmune serum reactive antigens and fragments thereof, nucleic acid molecules or inhibitors of the invention to interfere with the initial physical interaction between a pathogen and mammalian host responsible for sequelae of infection. In particular the molecules of the invention may be used: i) in the prevention of adhesion of enteroaggregative E. coli, enterotoxigenic E. coli, S. flexneri and/or C. jejuni to mammalian extracellular matrix proteins at mucosal surfaces and on in-dwelling devices or to extracellular matrix proteins in wounds; ii) to block bacterial adhesion between mammalian extracellular matrix proteins and bacterial proteins which mediate tissue damage or invasion iii) or lead to evasion of immune defense; iv) to block the normal progression of pathogenesis in infections initiated other than by the implantation of in-dwelling devices or by other surgical techniques, e.g. through inhibiting nutrient acquisition.

[0241] Each of the DNA coding sequences provided herein may be used in the discovery and development of antibacterial compounds. The encoded protein upon expression can be used as a target for the screening of antibacterial drugs. Additionally, the DNA sequences encoding the amino terminal regions of the encoded protein or Shine-Delgarno or other translation facilitating sequences of the respective mRNA can be used to construct antisense sequences to control the expression of the coding sequence of interest.

[0242] The antagonists and agonists may be employed, for instance, to inhibit diseases arising from infection with Escherichia, Shigella and Campylobacter, especially enteroaggregative E. coli, enterotoxigenic E. coli, S. flexneri and/or C. jejuni, such as diarrheal disease.

[0243] In a still further aspect the present invention is related to an affinity device such affinity device comprises as least a support material and any of the hyperimmune serum reactive antigens and fragments thereof according to the present invention, which is attached to the support material. Because of the specificity of the hyperimmune serum reactive antigens and fragments thereof according to the present invention for their target cells or target molecules or their interaction partners, the hyperimmune serum reactive antigens and fragments thereof allow a selective removal of their interaction partner(s) from any kind of sample applied to the support material provided that the conditions for binding are met. The sample may be a biological or medical sample, including but not limited to, fermentation broth, cell debris, cell preparation, tissue preparation, organ preparation, blood, urine, lymph liquid, liquor and the like.

[0244] The hyperimmune serum reactive antigens and fragments thereof may be attached to the matrix in a covalent or non-covalent manner. Suitable support material is known to the one skilled in the art and can be selected from the group comprising cellulose, silicon, glass, aluminium, paramagnetic beads, starch and dextrane.

[0245] The present invention is further illustrated by the following figures, examples and the sequence listing, from which further features, embodiments and advantages may be taken. It is to be understood that the present examples are given by way of illustration only and not by way of limitation of the disclosure.

[0246] In connection with the present invention

[0247] FIG. 1 shows the characterization of human sera as sources of pathogen specific antibodies.

[0248] FIG. 2 shows the characterization of two small fragment genomic libraries.

[0249] FIG. 3 shows the selection of bacterial cells by MACS using biotinylated human IgGs.

[0250] FIG. 4 shows the PCR analysis to determine the gene distribution of selected antigens in clinical isolates of the respective bacterial pathogen.

[0251] FIG. 5 shows examples for induction of epitope-specific antibodies in mice by immunization with E. coli lysates.

[0252] Table 1 shows the summary of all screens performed with genomic E. coli libraries and human serum.

[0253] Table 2 shows the summary of all screens performed with genomic S. flexneri libraries and human serum.

[0254] Table 3 shows the summary of all screens performed with genomic C. jejuni libraries and human serum.

[0255] Table 4 shows all genes identified from enteroaggregative E. coli as antigens by the genomic screens.

[0256] Table 5 shows the summary of the gene distribution analysis for a selected number of antigens in various strains of the respective bacterial species.

[0257] Table 6 shows the summary of mouse immunogenicity experiments.

[0258] Table 7 shows the summary of the peptide ELISA with human sera.

[0259] Table 8 shows the list of additional antigens identified by bacterial surface display screens.

[0260] The figures and tables to which it might be referred to in the specification are described in the following in more details.

[0261] FIG. 1 shows the characterization of human sera by measuring antibodies specific for ETEC, EAEC, C. jejuni and S. flexneri 2a by immune assays. Total IgG antibody levels were measured by standard ELISA (A) using bacterial whole cells (WC), total bacterial lysates (L) or culture supernant fractions (SN) prepared from ETEC, EAEC and C. jejuni or (B) S. flexneri whole cells. Serum samples from healthy adults living in endemic areas were analysed at two different serum dilutions. Results of representative experiments are shown for (A) with five selected and two non-selected serum samples and for (B) with 25 sera with five selected (filled bar) and 20 unselected (open bar) samples. Data are expressed as ELISA units calculated from absorbance at 405 nm at a serum dilution in the linear range of detection. (C, D) Immunoblot analysis was performed on sera pre-selected by ELISA in order to ensure multiple immune reactivity with protein antigens. Results of a representative experiment using total bacterial lysate prepared from ETEC, EAEC and C. jejuni (C) or from S. flexneri (D) reacted with human sera at 5,000× dilution are shown. IgG antibodies were detected by anti-human IgG specific secondary reagents. Not selected, low titer sera were included as negative controls (NC). Mw: molecular weight markers.

[0262] FIG. 2 (A) shows the fragment size distribution of the ETEC small fragment genomic library, LET-50. After sequencing 576 randomly selected clones, sequences were trimmed (496) to eliminate vector residues and the numbers of clones with various genomic fragment sizes were plotted. (B) shows the graphic illustration of the distribution of the same set of randomly sequenced clones of LET-50 over the E. coli K12 chromosome. (C) shows the fragment size distribution of the S. flexneri 2a small fragment genomic library, LSF-50. After sequencing 576 randomly selected clones, sequences were trimmed (467) to eliminate vector residues and the numbers of clones with various genomic fragment sizes were plotted. (D) shows the graphic illustration of the distribution of the same set of randomly sequenced clones of LSP-50 over the S. flexneri 2a chromosome. Circles indicate matching sequences to annotated ORFs in +/+ orientation and diamonds represent fully matched clones to annotated ORFs in ± orientation or to non-coding chromosomal sequences in +/+ or ± orientation. Rectangles position all clones with chimeric sequences. Numeric distances in base pairs are indicated over the circular genome for orientation. Partitioning of various clone sets within the library is given in numbers and percentage at the bottom of the figure.

[0263] FIG. 3 (A) shows the MACS selection with biotinylated human IgGs. The LET-50 library in pMAL9.1 was screened with 10-20 μg biotinylated IgG (IC15-IgG, purified from human serum). As negative control, no serum was added to the library cells for screening. Number of cells selected after the 1^{st} and 2^{nd} elution are shown for each selection round (upper and lower panel, respectively). (B) shows the reactivity of specific clones (1-26) selected by bacterial surface display as analysed by immunoblot analysis with the human serum IgG pool (IC15-IgG, 4 μl/μl) used for selection by MACS at a dilution of 1:3,000. As a loading control the same blot was also analysed with antibodies directed against the platform protein LamB at a dilution of 1:5,000. (C) shows the MACS selection with biotinylated human IC14-IgG and the LSF-50 library in pMAL9.1. (D) shows the reactivity of specific clones (1-26) selected by bacterial surface display as analysed by immunoblot analysis with the human serum IgG pool (IC14-IgG, 4 μg/μl) used for selection by MACS at a dilution of 1:3,000.

[0264] FIG. 4 (A) shows the representation of different strains of enteroaggregative E. coli, enterotoxigenic E. coli, or S. flexneri clinical isolates analysed for the gene distribution study. The geographic region is listed for all three strains, while the serotype is given in addition for S. flexneri strains. (B) to (D) shows an example for the PCR analysis for the gene distribution of one gene for each of the three analysed pathogenic species with the respective oligonucleotides and 46 clinical strains. (B) The predicted size of the PCR fragment derived from antigen pCP0179 from S. flexneri is 300 bp. (C) The predicted size of the PCR fragment derived from antigen EAEC147 from enteroaggregative E. coli is 400 bp. (D) The predicted size of the PCR fragment derived from antigen ECs1646 from enterotoxigenic E. coli is 716 bp. 1-46, strains or clinical isolates as shown under (A); −, no genomic DNA added; +, genomic DNA from the respective bacterial pathogen, which served as template for library construction.

[0265] FIG. 5 shows the measurement of epitope-specific mouse serum IgG antibody levels induced by total bacterial lysates of LamB or FhuA expressing E. coli clones with enteroaggregative or enterotoxigenic E. coli or S. flexneri 2a-derived epitopes. The figure shows a representative peptide ELISA experiment with three sets of mouse sera (5 mice in each group, 1-5) generated by epitopes expressed by bacterial clones ECOA144, ECOA038 and ECOA051, respectively. Sera were tested at two different dilutions. Open bars:, 200×; filled bars, 1000×. Biotin-labeled synthetic peptides corresponding to the respective epitopes were used in the peptide ELISA. Sera induced with E. coli lysate without pathogen-derived epitopes are indicated as PhuA or LamB.

[0266] Table 1: Immunogenic Proteins Identified from E. coli by Bacterial Surface Display.

[0267] A, 50 bp library of enteroaggregative E. coli O42 (EAEC) in LamB with IC11-IgG (819), B, 300 bp library of EAEC in fhuA with IC11-IgG (733), C, 50 bp library of EAEC in LamB with IC12-IgG (872), D, 300 bp library of EAEC in fhuA with IC12-IgG (747), E, 50 bp library of enterotoxigenic E. coli ATCC31705 (ETEC) in lamB with IC15-IgG (827), F, 300 bp library of ETEC in fhuA with IC15-IgG (503), G, 50 bp library of enteroaggregative E. coli O42 in lamB with IC16-IgG (708), H, 300 bp library of EAEC in fhuA with IC16-IgG (823), L, 50 bp library of EAEC in LamB with IC17-IgG (838), M, 300 bp library of EAEC in fhuA with IC17-IgG (783), N, 50 bp library of ETEC in lamB with IC16-IgG (777), O, 300 bp library of ETEC in fhuA with IC16-IgG (128), P, 50 bp library of ETEC in lamB with IC17-IgG (747), Q, 300 bp library of ETEC in fhuA with IC17-IgG (588); *, prediction of antigenic sequences longer than 5 amino acids was performed with the program ANTIGENIC {Kolaskar, A. et al., 1990}. Listed are the genes from E. coli O157:H7 as identified by BLAST of the determined epitope sequence against the genomic sequence of E. coli O157:H7 (http://www.tigr.org/tdb/mdb/mdbcomplete.html). In cases when the BLAST analysis could not identify a homologous sequence in E. coli O157:H7, the antigenic sequence listed was identified by BLAST against the unfinished genomic sequence of enteroaggregative E. coli O42 http://www.sanger.ac.uk/Projects/Escherichia Shigella e.g. EAEC11), or the epitope sequence was listed as such (e.g. ETLAB27).

[0268] Table 2: Immunogenic Proteins Identified from S. flexneri by Bacterial Surface Display.

[0269] A, 50 bp library of S. flexneri 2a in lamB with IC13-IgG (855), B, 300 bp library in fhuA with IC13-IgG (812), C, 50 bp library in lamB with IC14-IgG (745), D, 300 bp library in fhuA with IC14IgG (773); *, prediction of antigenic sequences longer than 5 amino acids was performed with the program ANTIGENIC {Kolaskar, A. et al. 1990}.

[0270] Table 3: Immunogenic Proteins Identified from C. jejuni by Bacterial Surface Display.

[0271] A, 50 bp library of C. jejuni NCTC 11168 in LamB with P12-IgG (628), B, 50 bp library in LamB with P12-IgG (705), C, 50 bp library in LamB with P12-IgA (691), D, 300 bp library in FhuA with P12-IgA (464), E, 50 bp library in lamB with IC11-IgG (698), F, 300 bp library in FhuA with IC11-IgG (815), *, prediction of antigenic sequences longer than 5 amino adds was performed with the program ANTIGENIC {Kolaskar, A. et al., 1990}.

[0272] Table 4: Immunogenic Proteins Identified from Enteroaggregative E. coli (EAEC) by Bacterial Surface Display.

[0273] All antigenic proteins from Table 1, for which a BLAST analysis obtained a match with the genomic sequence of E. coli O157:H7 were subjected to BLAST analysis against the unfinished and not annotated genomic sequence of enteroaggregative E. coli O42 (http://www.sanger.ac.uk/Projects/Escherichia Shigella). Listed are all sequences for which a BLAST match could be identified homologous to the enteropathogenic E. coli O157:H7 sequence. *Antigenic sequences longer than 5 amino acids were predicted with the program ANTIGENIC {Kolaskar, A. et al., 1990}.

[0274] Table 5: Gene Distribution in Enteroaggregative E. coli, Enterotoxigenic E. coli and S. flexneri Strains.

[0275] Fourty six enteroaggregative E. coli, enterotoxigenic E. coli, or S. flexneri strains as shown in FIG. 4 were tested by PCR with oligonudeotides specific for the genes encoding relevant antigens. The gene distribution lists the number of positive PCR results from all 46 tested strains and is an indication of the presence and conservation of the gene in diverse clinical isolates of the respective bacterial species. *, The source indicates the pathogenic organism from which the antigen was identified in the antigen screen. **, The column “homolog” lists homologous genes which are present in E. coli O157:H7, S. flexneri 2a or EAEC as determined by BLAST analysis. n.d., not determined.

[0276] Table 6: Immunogenicity of Antigenic Epitopes.

[0277] Enteroaggregative or enterotoxigenic E. coli or S. flexneri 2a antigens were tested for immunogenicity by immunization with E. coli clones harboring plasmids encoding the platform proteins LamB or FhuA fused to enteroaggregative or enterotoxigenic E. coli or S. flexneri 2a peptides. The presence of epitope-specific antibodies were detected and measured by peptide ELISA. Results are expressed as + to +++++, and calculated as the sum of the reactivity of individual mouse sera based on ELISA units (as indicated in FIG. 5). Location of synthetic peptides within the antigenic ORFs according to the genome annotation of the relevant strain is given in columns (aa from) and (aa to) indicating the first and last amino acid residue, respectively.

[0278] Table 7: Peptide ELISA with Peptides Derived from Enteric Pathogens.

[0279] The “Sum” represents the number of sera, for which the OD405 nm measurement was at least 0.1 OD units above the blank without coating. “From aa” and “To aa” denotes the position of the peptide relative to the full length protein as listed under the respective sequence identification number (SeqID). A, ELISA with peptides derived from E. coli and 22 human sera (N215, N256, N320, N450, N498, N159, N211, N230, N261, N353, N168, N229, N468, N502, N521, N394, N439, N165, P773, P776, P849, C24). B, ELISA with peptides derived from S. flexneri and 22 human sera (N154, N165, N247, N251, N501, N278, N423, N432, N471, N480, N211, N230, N394, N439, N468, N229, N521, N168, P773, P776, P849, C24). C, ELISA with peptides derived from C. jejuni and 22 human sera (P773, P774, P776, P817, P849, P775, P777, P850, P851, P852, P855, P856, N423, N432, N480, N211, N230, N394, N439, N468, P779, C1). D, ELISA with peptides derived from E. coli and S. flexneri and 42 human sera (N278, N423, N432, N471, N480, N159, N211, N230, N261, N353, N168, N229, N468, N502, N521, N394, N439, N542, P1277, P1303, P773, N215, N256, N320, N450, N498, P1292, P1310, P1312, P1316, N154, N165, N247, N251, N501, P773, P774, P776, P817, P849, N211, N480).

[0280] Table 8: Additional Immunogenic Proteins Identified from E. coli by Bacterial Surface Display.

[0281] A, 50 bp library of enteroaggregative E. coli O42 (EAEC) in lamB with IC11-IgG (819), B, 300 bp library of EAEC in fhuA with IC11-IgG (733), C, 50 bp library of EAEC in lamB with IC12-IgG (872), D, 300 bp library of EAEC in fhuA with IC12-IgG (747), E, 50 bp library of enterotoxigenic E. coli ATCC31705 (ETEC) in lamB with IC15-IgG (827), F, 300 bp library of ETEC in fhuA with IC15-IgG (503), G, 50 bp library of enteroaggregative E. coli O42 in lamB with IC16-IgG (708), H, 300 bp library of EAEC in fhuA with IC16-IgG (823), L, 50 bp library of EAEC in lamB with IC17-IgG (838), M 300 bp library of EAEC in fhuA with IC17-IgG (783), N, 50 bp library of ETEC in lamB with IC16-IgG (777), O, 300 bp library of ETEC in fhuA with IC16IgG (128), P, 50 bp library of ETEC in lamB with IC17-IgG (747), Q, 300 bp library of ETEC in fhuA with IC17-IgG (588). Listed are the genes from E. coli O157:H7 as identified by BLAST of the determined epitope sequence against the genomic sequence of E. coli O157:H7 (http://www.tigr.org/tdb/mdb/mdbcomplete.html). In cases when the BLAST analysis could not identify a homologous sequence in E. coli O157:H7, the antigenic sequence listed was identified by BLAST against the unfinished genomic sequence of enteroaggregative E. coli O42 (http://www.sanger.ac.uk/Projects/Escherichia Shigella, e.g. EAEC11), or the epitope sequence was listed as such (e.g. ETLAB27). *, prediction of antigenic sequences longer than 5 amino acids was performed with the program ANTIGENIC (Kolaskar and Tongaonkar, 1990).

### EXAMPLES

### Example 1

### Characterization and Selection of Human Serum Sources Based on Anti-E. coli, S. flexneri and C. jejuni Antibodies, Preparation of Antibody Screening Reagents

[0282] Experimental Procedures

[0283] Enzyme Linked Immune Assay (ELISA).

[0284] ELISA plates (Maxisorb, Millipore) were coated with 5-10 μg/ml total protein diluted in coating buffer (0.1M sodium carbonate pH 9.2). For whole cell ELISA, 10⁶ biotin-labeled and fixed bacteria were added to Streptavidin-coated ELISA plates. Two dilutions of sera (2,000×, 10,000×) were made in PBS-BSA. Highly specific Horse Radish Peroxidase (HRP)-conjugated anti-human IgG secondary antibodies (Southern Biotech) were used according to the manufacturers' recommendations (dilution: 1,000×). Antigen-antibody complexes were quantified by measuring the conversion of the substrate (ABTS) to colored product based on OD_{450 nm} readings by automatic ELISA reader (TECAN SUNRISE).

[0285] Preparation of Bacterial Antigen Extracts

[0286] Whole cells: Bacteria were grown until OD₆₀₀−0.5 and harvested by centrifugation at 4,000 rpm for 15 min at 4° C. After washing twice with PBS, bacteria was resuspended in PBS, and adjusted to a concentration of 2.5×10⁷/ml. Biotinylation was performed by incubation with biotin in PBS at room temperature for 30 min. Free biotin was removed by repeated washing and centrifugation, followed by fixation with 2% PFA at RT for 10 min.

[0287] Total bacterial lysate: Bacteria were grown overnight in LB or RPM medium (ETEC, EAEC), or Difco0001 medium (S. flexneri), or on LB agar plates and scraped off (C. jejuni) and lysed by repeated freeze-thaw cycles: incubation on dry ice/ethanol-mixture until frozen (1 min), then thawed at 37° C. (5 min): repeated 3 times. This was followed by sonication and collection of supernatant by centrifugation (4,000 rpm, 15 min, 4° C).

[0288] Culture supernatant: After removal of bacteria by centrifugation, the supernatant of overnight grown bacterial cultures was sterile filtered. Afterwards the supernatant was concentrated with AMICON ULTRA-tubes (Millipore) 10 to 100 fold depending on growth media. The protein concentration of samples was determined by Bradford assay.

[0289] Immunoblotting

[0290] Total bacterial lysate and culture supernatant samples were prepared from in vitro grown enteroaggregative or enterotoxigenic E. coli, S. flexneri 2a or C. jejuni NCTC11168. 10 to 25 μg total protein/lane was separated by SDS-PAGE using the BioRad Mini-Protean Cell electrophoresis system and proteins transferred to nitrocellulose membrane (ECL, Amersham Pharmacia). After overnight blocking in 5% milk, human sera were added at 2,000× dilution, and HRPO labeled anti-human IgG was used for detection.

[0291] Purification of Antibodies for Genomic Screening

[0292] Five sera per antibody pool were selected based on the overall anti-bacterial titers for serum used in the screening procedure. Antibodies against E. coli DH5alpha proteins were removed by incubating the heat-inactivated sera with whole cell E. coli DH5alpha cells (transformed with pHIE11, grown under the same condition as used for bacterial surface display). Highly enriched preparations of IgGs from the pooled, depleted sera were generated by protein G affinity chromatography, according to the manufacturer's instructions (UltraLink Immobilized Protein G, Pierce). IgA antibodies were purified also by affinity chromatography using biotin-labeled anti-human IgA (Southern Biotech) immobilized on Streptavidin-agarose (GIBCO BRL). The efficiency of depletion and purification was checked by ELISA measurements.

[0293] Results

[0294] The antibodies produced against enteroaggregative or enterotoxigenic E. coli, S. flexneri or C. jejuni by the human immune system and present in human sera are indicative of the in vivo expression of the antigenic proteins and their immunogenicity. These molecules are essential for the identification of individual antigens in the approach as described in the present invention, which is based on the interaction of the specific anti-bacterial antibodies and the corresponding enteroaggregative or enterotoxigenic E. coli, S. flexneri 2a or C. jejuni NCTC11168 peptides or proteins. To gain access to relevant antibody repertoires, human sera were collected from healthy adult individuals living in endemic areas (Bangladesh and Egypt). It is important to screen with antibodies from populations of at, least two different geographic regions, since enteric diseases affect individuals in various regions of the world, but prevalences of the causative pathogens vary from region to region. A distinct set of sera with 90 sampels was collected from patients with C. jejuni infections from Middle Europe, since Camplyobacter infections are common worldwide. Laboratory diagnosis of C. jejuni infections was established by Virion/Serion GmbH Campylobacter IgA ELISA.

[0295] Antibodies in serum and other body fluids induced in individuals exposed to the pathogens are crucial for antigen identification. Enteric infections are very common, and antibodies are present as a consequence of natural immunization from previous encounters, that are asymptomatic colonization, acute or chronic infections. It is likely that sera from adults living in endemic areas (multiple exposure) and having high antibody titers against enteroaggregative or enterotoxigenic E. coli, S. flexneri 2a or C. jejuni are immune (protected) from disease caused by these pathogens. Antibodies from these individuals seem to be especially valuable for the identification of the corresponding antigens.

[0296] 450 endemic serum samples were collected and characterized for anti-enteroaggregative or enterotoxigenic E. coli, S. flexneri 2a or C. jejuni NCTC11168 antibodies and 90 C. jejuni-infected patient sera for C. jejuni NCTC11168 antibodies by a series of immune assays. Primary characterization was done by ELISA using different antigen preparations, such as bacterial whole cell and supernatant fractions for ETEC, EAEC and S. flexneri 2a, and total bacterial lysate for C. jejuni NCTC11168. Representative experiments are shown in FIGS. 1A and B. Antibody titers were measured and ELISA units calculated from serum dilutions in the linear range of response. Sera were ranked based on the antibody reactivity against the two complex antigenic mixtures, and the highest ones were selected for further testing by immunoblotting. This analysis confirmed a high antibody reactivity of the pre-selected sera against multiple enteroaggregative or enterotoxigenic E. coli, S. flexneri 2a or C. jejuni NCTC11168 proteins, especially when compared to not selected, low-titer sera (FIGS. 1C and D). The final selection of sera to be included in antibody-pools was based mainly on multiple immunogenic bands in immunoblotting experiments. This extensive antibody characterization approach has led to the unambiguous identification of anti-enteroaggregative or enterotoxigenic E. coli, S. flexneri 2a and C. jejuni NCTC11168 hyperimmune sera.

[0297] Selected sera were included in 8 different IgG and 1 IgA pools (5 sera in each pool) for antigen identification by bacterial surface display. IgG antibodies were purified from pooled sera by affinity chromatography and depleted of E. coli DH5alpha-reactive antibodies to avoid background in the bacterial surface display screens.

### Example 2

### Generation of Highly Random, Frame-Selected, Small-Fragment, Genomic DNA Libraries of Enteroaggregative or Enterotoxigenic E. coli, S. flexneri 2a and C. jejuni NCTC11168

[0298] Experimental Procedures

[0299] Preparation of genomic DNA. 50 ml culture medium (LB for enteroaggregative and enterotoxigenic E. coli; Difco0001 for S. flexneri 2a; modified CCDA-Preston for C. jejuni NCTC11168) were inoculated with respective bacteria from a frozen stab and grown with aeration and shaking for 18 h at 37° C. The culture was then harvested, centrifuged with 1,600× g for 15 min and the supernatant was removed. Bacterial pellets were washed 3× with PBS. Genomic DNA was prepared using the Wizard Genomic DNA Purification Kit for GRAM-negative bacteria from Promega according to the instructions of the manufacturer. After the final precipitation with ethanol, DNA was recovered by centrifuging the precipitates with 10-12,000× g, then dried on air and dissolved in ddH₂O.

[0300] Preparation of small genomic DNA fragments. Genomic DNA fragments were mechanically sheared into fragments ranging in size between 150 and 300 bp using a cup-horn sonicator (Bandelin Sonoplus UV 2200 sonicator equipped with a BB5 cup horn, 10 sec. pulses at 100% power output) or into fragments of size between 50 and 70 bp by mild DNase I treatment (Novagen). It was observed that sonication yielded a much tighter fragment size distribution when breaking the DNA into fragments of the 150-300 bp size range. However, despite extensive exposure of the DNA to ultrasonic wave-induced hydromechanical shearing force, subsequent decrease in fragment size could not be efficiently and reproducibly achieved. Therefore, fragments of 50 to 70 bp in size were obtained by mild DNase I treatment using Novagen's shotgun cleavage kit. A 1:20 dilution of DNase I provided with the kit was prepared and the digestion was performed in the presence of MnCl₂ in a 60 μl volume at 20° C. for 5 min to ensure double-stranded cleavage by the enzyme. Reactions were stopped with 2 μl of 0.5 M EDTA and the fragmentation efficiency was evaluated on a 2% TAE-agarose gel. This treatment resulted in total fragmentation of genomic DNA into near 50-70 bp fragments. Fragments were then blunt-ended twice using T4 DNA Polymerase in the presence of 100 μM each of dNTPs to ensure efficient flushing of the ends. Fragments were used immediately in ligation reactions or frozen at −20° C. for subsequent use.

[0301] Description of the vectors. The vector pMAL4.31 was constructed on a pASK-IBA backbone {Skerra, A., 1994} with the beta-lactamase (bla) gene exchanged with the Kanamycin resistance gene. In addition the bla gene was cloned into the multiple cloning site. The sequence encoding mature beta-lactamase is preceded by the leader peptide sequence of ompA to allow efficient secretion across the cytoplasmic membrane. Furthermore a sequence encoding the first 12 amino acids (spacer sequence) of mature beta-lactamase follows the ompA leader peptide sequence to avoid fusion of sequences immediately after the leader peptidase cleavage site, since e.g. clusters of positive charged amino acids in this region would decrease or abolish translocation across the cytoplasmic membrane {Kajava, A. et al., 2000}. A SmaI restriction site serves for library insertion. An upstream FseI site and a downstream NotI site, which were used for recovery of the selected fragment, flank the SmaI site. The three restriction sites are inserted after the sequence encoding the 12 amino acid spacer sequence in such a way that the bla gene is transcribed in the −1 reading frame resulting in a stop codon 15 bp after the NotI site. A +1 bp insertion restores the bla ORF so that beta-lactamase protein is produced with a consequent gain of Ampicillin resistance.

[0302] The vector pMAL9.1 was constructed by cloning the lamB gene into the multiple cloning site of pEH1 {Hashemzadeh-Bonehi, L. et al., 1998}. Subsequently, a sequence was inserted in lamB after amino acid 154, containing the restriction sites FseI, SmaI and NotI. The reading frame for this insertion was constructed in such a way that transfer of frame-selected DNA fragments excised by digestion with FseI and NotI from plasmid pMAL4.31 yields a continuous reading frame of lamB and the respective insert.

[0303] The vector pHIE11 was constructed by cloning the fluA gene into the multiple cloning site of pEH1. Thereafter, a sequence was inserted in fhuA after amino acid 405, containing the restriction site FseI, XbaI and NotI. The reading frame for this insertion was chosen in a way that transfer of frame-selected DNA fragments excised by digestion with FseI and NotI from plasmid pMAL4.31 yields a continuous reading frame of fhuA and the respective insert.

[0304] Cloning and evaluation of the library for frame selection. Genomic enteroaggregative or enterotoxigenic E. coli, S. flexneri 2a or C. jejuni NCTC11168 DNA fragments were ligated into the SmaI site of the vector pMAL4.31. Recombinant DNA was electroporated into DH10B electrocompetent E. coli cells (GIBCO BRL) and transformants plated on LB-agar supplemented with Kanamycin (50 μg/ml) and Ampicillin (50 μg/ml). Plates were incubated over night at 37° C. and colonies collected for large scale DNA extraction. A representative plate was stored and saved for collecting colonies for colony PCR analysis and large-scale sequencing. A simple colony PCR assay was used to initially determine the rough fragment size distribution as well as insertion efficiency. From sequencing data the precise fragment size was evaluated, junction intactness at the insertion site as well as the frame selection accuracy (3n+1 rule).

[0305] Cloning and evaluation of the library for bacterial surface display. Genomic DNA fragments were excised from the pMAL4.31 vector, containing the enteroaggregative or enterotoxigenic E. coli, S. flexneri 2a or C. jejuni NCTC11168 library with the restriction enzymes FseI and NotlI. The entire population of fragments was then transferred into plasmids pMAL9.1 (LamB) or pHIE11 (FhuA), which have been digested with FseI and NotI. Using these two restriction enzymes, which recognise an 8 bp GC rich sequence, the reading frame that was selected in the pMAL4.31 vector is maintained in each of the platform vectors. The plasmid library was then transformed into E. coli DH5alpha cells by electroporation. Cells were plated onto large LB-agar plates supplemented with 50 μg/ml Kanamycin and grown over night at 37° C. at a density yielding clearly visible single colonies. Cells were then scraped off the surface of these plates, washed with fresh LB medium and stored in aliquots for library screening at −80° C.

[0306] Results

[0307] Libraries for frame selection. Two libraries were generated for each bacterial pathogen in the pMAL4.31 vector with sizes of approximately 70 and 300 bp, respectively. For each library, ligation and subsequent transformation of approximately 1 μg of pMAL4.31 plasmid DNA and 50 ng of fragmented genomic enteroaggregative or enterotoxigenic E. coli, S. flexneri 2a or C. jejuni NCTC11168 DNA yielded 1.2×10⁵ to 2×10⁶ clones after frame selection. To assess the randomness of the libraries, approximately 500 to 600 randomly chosen clones of each library were sequenced. The representative bioinformatic analysis of two libraries (LET-50 and LSF-50) showed that of clones corresponding to these libraries only very few were present more than once. Furthermore, it was shown for the LET-50 library that approximately 83% of the clones fell in the size range between 25 and 100 bp with an average size of approximately 54 bp (FIG. 2A). Almost all sequences (97%) followed the 3n+1 rule, showing that the majority of clones were properly frame selected. Regarding the LSF-50 library, 98.5% of all clones possessed the proper reading-frame and 82.5% fell within the 25 to 100 bp range with an average size of 67 bp.

[0308] Bacterial surface display libraries. The display of peptides on the surface of E. coli required the transfer of the inserts from the LET-50, LEA-50, LCJ-50, LSF-50 and the LET-300, LEA-300, LCJ-300, LSF-300 libraries from the frame selection vector pMAL4.31 to the display plasmids pMAL9.1 (LamB) or pHIE11 (FhuA). Genomic DNA fragments were excised by FseI and NotI restriction and ligation of 5 ng inserts with 0.1 μg plasmtid DNA and subsequent transformation into DH5alpha cells resulted in 2.2×10⁵ to 3×10⁶ clones. The clones were scraped off the LB plates and frozen without further amplification.

### Example 3

### Identification of Highly Immunogenic Peptide Sequences from Enteroaggregative or Enterotoxigenic E. coli, S. flexneri 2a and C. jejuni NCTC11168 Using Bacterial Surface Displayed Genomic Libraries and Human Serum

[0309] Experimental Procedures

[0310] MACS screening. Approximately 2.5×10⁸ cells from a given library were grown in 5 ml LB-medium supplemented with 50 μg/ml Kanamycin for 2 h at 37° C. Expression was induced by the addition of 1 mM IPTG for 30 min. Cells were washed twice with fresh LB medium and approximately 2×10⁷ cells re-suspended in 100 μl LB medium and transferred to an Eppendorf tube.

[0311] 10 to 20 μg of biotinylated, human IgGs purified from serum was added to the cells and the suspension incubated overnight at 4° C. with gentle shaking. 900 μl of LB medium was added, the suspension mixed and subsequently centrifuged for 10 min at 6,000 rpm at 4° C. (For IgA screens, 10 μg of purified IgAs were used and these captured with biotinylated anti-human-IgG secondary antibodies). Cells were washed once with 1 ml LB and then re-suspended in 100 μl LB medium. 10 μl of MACS microbeads coupled to streptavidin (Miltenyi Biotech, Germany) were added and the incubation continued for 20 min at 4° C. Thereafter 900 μl of LB medium was added and the MACS microbead cell suspension was loaded onto the equilibrated MS column (Miltenyi Biotech, Germany) which was fixed to the magnet. (The MS columns were equilibrated by washing once with 1 ml 70% EtOH and twice with 2 ml LB medium.)

[0312] The column was then washed three times with 3 ml LB medium. After removal of the magnet, cells were eluted by washing with 9 ml LB medium. After washing the column with 3 ml LB medium, the 2 ml eluate was loaded a second time on the same column and the washing and elution process repeated. The loading, washing and elution process was performed a third time, resulting in a final eluate of 2 ml.

[0313] A second and third round of screening was performed as follows. The cells from the final eluate were collected by centrifugation and re-suspended in 1 ml LB medium supplemented with 50 μg/ml Kanamycin. The culture was incubated at 37° C. for 90 min and then induced with 1 mM IPTG for 30 min. Cells were subsequently collected, washed once with 1 ml LB medium and suspended in 10 μl LB medium. 10 to 20 μg of human, biotinylated IgGs were added again and the suspension incubated over night at 4° C. with gentle shaking. All further steps were exactly the same as in the first selection round. Cells selected after two rounds of selection were plated onto LB-agar plates supplemented with 50 μg/ml Kanamycin and grown over night at 37° C.

[0314] Evaluation of selected clones by sequencing and Western blot analysis. Selected clones were grown overnight at 37° C. in 3 ml LB medium supplemented with 50 μg/ml Kanamycin to prepare plasmid DNA using standard procedures. Sequencing was performed at MWG (Germany).

[0315] For Western blot analysis approximately 10 to 20 μg of total cellular protein was separated by 10% SDS-PAGE and blotted onto HybondC membrane (Amersham Pharmacia Biotech, England). The LamB or FhuA fusion proteins were detected using human serum as the primary antibody at a dilution of approximately 1:3,000 to 1:5,000 and anti-human IgG or IgA antibodies coupled to HRP at a dilution of 1:5,000 as secondary antibodies. Detection was performed using the ECL detection kit (Amersham Pharmacia Biotech, England). Alternatively, rabbit anti-FhuA or rabbit anti-LamB polyclonal immune sera were used as primary antibodies in combination with the respective secondary antibodies coupled to HRP for the detection of the fusion proteins.

[0316] Results

[0317] Screening of bacterial surface display libraries by magnetic activated cell sorting (MACS) using biotinylated Igs. The libraries LET-50, LEA-50, LCJ-50, LSF-50 in pMAL9.1 and LET-300, LEA-300, LCJ-300, LSF-300 in pHIE11 were screened with pools of biotinylated, human IgGs and IgAs prepared from sera of healthy adults or patients (EAEC: IC11, IC12, IC16, IC17; ETEC: IC15, IC16, IC17; S. flexneri: IC13, IC14; C. jejuni: IC11, P12)) (see Example 1: Preparation of antibodies from human serum). The selection procedure was performed as described under Experimental procedures. FIG. 3A shows a representative example of a screen with the LET-50 library and IC15-IgGs. As can be seen from the colony count after the first selection cycle from MACS screening, the total number of cells recovered at the end is drastically reduced from 5×10⁷ cells to approximately 1×10⁴ cells, and the selection without antibodies showed a more pronounced reduction in cell numbers (FIG. 3A). After a second round of selection all cells from the first round were recovered with IC15-IgGs (6×10⁴), while only 2×10³ cells were recovered when no IgGs from human serum were added, dearly showing that selection was dependent on ETEC specific antibodies. To evaluate the performance of the screen, 26 selected clones were picked randomly and subjected to immunoblot analysis with the screening IC15-IgG pool (FIG. 3B). This analysis revealed that almost all selected clones showed reactivity with antibodies present in the relevant serum whereas the control strain expressing LamB without an ETEC specific insert did not react with the same serum. In general, the rate of reactivity was observed to lie within the range of 35 to 90%. Colony PCR analysis showed that all selected clones contained an insert in the expected size range.

[0318] Similar results were seen in screens with libraries from the other pathogenic organisms, S. flexneri 2a and C. jejuni. As a second example, FIGS. 3C and D show the data obtained with the small insert LSF-50 library from S. flexneri 2a in LamB and the IC14IgG antibody pool. Two rounds of MACS selection resulted in the enrichment of cells only in the presence, but not the absence of specific IgG (FIG. 3C), indicating that the selection was specific for the applied antibodies. The specific selection was then confirmed in the Western blot analysis of individual bacterial clones with the same IC14IgG antibody pool (FIG. 3D).

[0319] Subsequent sequencing of a larger number of randomly picked clones (600 to 1200) from each screen led to the identification of the gene and the corresponding peptide or protein sequence that was specifically recognized by the human serum antibodies used for screening. The frequency with which a specific clone is selected reflects at least in part the abundance and/or affinity of the specific antibodies in the serum used for selection and recognizing the epitope presented by this clone. In that regard it is striking that clones derived from some ORFs (e.g. virG, pCP0262 or ipaA from S. flexneri 2a) were picked more than 100 times, indicating their highly immunogenic property. Table 1 to 3 summarize the data obtained for all 24 performed screens for the four pathogenic bacteria. All clones that are presented in Tables 1 to 3 and Table 8 have been verified by immunoblot analysis using whole cellular extracts from single clones to show the indicated reactivity with the pool of human serum used in the respective screen. As can be seen from Tables 1 to 3 and Table 8, distinct regions of the identified ORF are identified as immunogenic, since variably sized fragments of the proteins are displayed on the surface by the platform proteins. Since the genomic sequence of enteroaggregative E. coli has been determined, but not annotated, all BLAST analyses with epitopes derived from the E. coli screens, have been first performed with the genomic sequence from enteropathogenic E. coli O157:H7. All these sequences have subsequentely also been blasted against the non-annotated preliminary sequence of enteroaggregative E. coli. Table 4 lists the genes as identified by this BLAST analysis. The identified antigenic epitopes are homologous to the ones listed in Table 1 for the E. coli O157:H7 sequences. The predicted antigenic sequences of these proteins are listed in Table 4.

[0320] It is further worth noticing that many of the genes identified by the bacterial surface display screen encode proteins that are either attached to the surface of the respective bacterium and/or are secreted. This is in accordance with the expected role of surface attached or secreted proteins in virulence of the enteric pathogens.

### Example 4

### Gene Distribution Studies with Highly Immunogenic Proteins Identified from Enteroaggregative or Enterotoxigenic E. coli, S. flexneri 2a and C. jejuni NCTC11168

[0321] Experimental Procedures

[0322] Gene distribution of antigens by PCR. An ideal vaccine antigen would be an antigen that is present in all, or the vast majority of strains of the target organism to which the vaccine is directed. In order to establish whether the genes encoding the identified enteroaggregative or enterotoxigenic E. coli, S. flexneri 2a and C. jejuni NCTC11168 antigens occur ubiquitously in the relevant strains, PCR was performed on a series of independent bacterial isolates with primers specific for the gene of interest Enteroaggregative or enterotoxigenic E. coli, S. flexneri 2a and C. jejuni NCTC11168 isolates were obtained covering the serotypes most frequently present in patients as shown in FIG. 4A. Oligonucleotide sequences as primers were designed for all identified ORFs yielding products of approximately 1,000 bp, if possible covering all identified immunogenic epitopes. Genomic DNA of all Enteroaggregative or enterotoxigenic E. coli, S. flexneri 2a and C. jejuni NCTC11168 strains was prepared as described under Example 2. PCR was performed in a reaction volume of 25 μl using Taq polymerase (1U), 200 nM dNTPs, 10 pMol of each oligonucleotide and the kit according to the manufacturers instructions (Invitrogen, The Netherlands). As standard, 30 cycles (1×: 5 min. 95° C., 30×: 30 sec. 95° C., 30 sec. 56° C., 30 sec. 72° C., 1× 4 min. 72° C.) were performed, unless conditions had to be adapted for individual primer pairs.

[0323] Results

[0324] Identified genes encoding immunogenic proteins were tested by PCR for their presence in 46 different strains of enteroaggregative or enterotoxigenic E. coli, and S. flexneri, repectively (FIG. 4A). As an example, FIG. 4B shows the PCR reaction for the S. flexneri pCP0179 antigen with all indicated 46 strains. As dearly visible, the gene is present in all strains analysed.

[0325] For the two genes as shown in FIGS. 4C and D, the analysis showed that both of these genes from enteroaggregative and enterotoxigenic E. coli, repectively are contained in most of the strains applied for this study. It must be anticipated that the PCR analysis is not capable of detected the same gene in every strain, since only small changes in sequence may abolish amplification by specific primers. Therefore the PCR analysis will only reveal the minimal number of strains that contain the antigen in question. All results with the selected antigens are summarized in Table 5. Importantly, some of the identified antigens are well conserved in all strains of the respective pathogen in sequence and size and are therefore novel vaccine candidates to prevent infections by enteric pathogens.

### Example 5

### Characterization of Immune Sera Obtained from Mice Immunized with Highly Immunogenic Proteins/Peptides from Enteroaggregative or Enterotoxigenic E. coli, S. flexneri 2a or C. jejuni NCTC11168 Displayed on the Surface of E. coli

[0326] Experimental Procedures

[0327] Generation of Immune Serafrom Mice

[0328] E. coli clones harboring plasmids encoding the platform protein fused to a enteroaggregative or enterotoxigenic E. coli, S. flexneri 2a or C. jejuni NCTC11168 peptide, were grown in LB medium supplemented with 50 μg/ml Kanamycin at 37° C. Overnight cultures were diluted 1:10, grown until an OD₆₀₀ of 0.5 and induced with 0.2 mM IPTG for 2 hours. Pelleted bacterial cells were suspended in PBS buffer and disrupted by sonication on ice, generating a crude cell extract. According to the OD₆₀₀ measurement, an aliquot corresponding to 5×10⁷ cells was injected into NMRI mice i.v., followed by a boost after 2 weeks. Serum was taken 1 week after the second injection. Epitope specific antibody levels were measured by peptide ELISA.

[0329] Results

[0330] Immunogenicity in mice. The presence of specific antibodies was determined by peptide ELISA as it is exemplified in FIG. 5, and summarized in Table 6. Fourty-one antigens from enteroaggregative or enterotoxigenic E. coli, S. flexneri 2a represented by 43 different epitope regions were shown to be immunogenic in mice. These experiments confirmed the bioinformatic prediction that many of the identified epitopes/proteins are immunogenic not only in humans, but also in experimental animals.

### Example 6

### Validation of Peptides from Enteroaggregative or Enterotoxigenic E. coli, S. flexneri 2a or C. jejuni NCTC11168 by Peptide ELISA

[0331] Enzynze Linked Immune Assay (ELISA).

[0332] ELISA plates (Maxisorb, Millipore) were coated with 5-10 μg/ml total protein diluted in coating buffer (0.1M sodium carbonate pH 9.2). Two dilutions of sera (400×, 2,000×) were made in PBS-BSA. Highly specific Horse Radish Peroxidase (HRP)-conjugated anti-human IgG secondary antibodies (Southern Biotech) were used according to the manufacturers' recommendations (dilutionr 1,000×). Antigen-antibody complexes were quantified by measuring the conversion of the substrate (ABTS) to colored product based on OD_{405 nm} readings by automatic ELISA reader (TECAN SUNRISE). The measurements at 400× dilution were used for the calculation of the results as displayed in Tables 7A-D.

[0333] Results

[0334] Immunogenicity in humans. The presence of specific antibodies in human sera was determined by peptide ELISA as summarized in Tables 7A-D. The human sera used for this analysis correspond to those that were included in the various serum pools applied for the identification of antigens by the bacterial surface display screens. Single or multiple peptides from individual antigens from enteroaggregative or enterotoxigenic E. coli, S. flexneri 2a and C. jejuni were analysed and many of these were shown to be immunogenic in humans. It is evident that some of the selected peptides are highly reactive with many or all of the investigated human sera (e.g. ECAA005.1, ECC2336.3, ECC4393.3), while others showed intermediate reactivities. For those antigens for which the selected epitope encompassed more than 30 amino adds, multiple peptides were designed with an overlap of 5 to 6 amino adds. For some of the antigens, it was observed that these multiple peptides from the same antigen showed different reactivities, further delineating the immunogenic region of the respective antigen (e.g. SF01383.1-4; ECO3832.1-3). These experiments confirmed that many of the identified epitopes/proteins are highly immunogenic in humans, indicating that they are expressed by the pathogen during infection and capable of inducing a strong immune response.

TABLE 1
Immunogenic proteins identified from E. coli by bacterial surface display.

| | | | No. of | Location of | | |
|---|---|---|---|---|---|---|
| | | | selected | identified | | Seq. |
| E. coli | | | clones per | immunogenic | Seq. | ID |
| antigenic | Putative function | | ORF and | region | ID | (Pro- |
| protein | (by homology) | predicted immunogenic aa* | screen | (aa) | (DNA) | tein) |
| ECs0014 | heat shock protein DnaK | 12-19, 24-29, 37-43, 47-53, 65-72, 83-95, | D: 4, M: 29, | 192-333 | 1 | 301 |
| | | 112-122, 136-147, 162-168, 174-181, | Q: 2 | | | |
| | | 189-195, 201-208, 216-221, 234-243, | | | | |
| | | 270-276, 278-288, 305-316, 318-342, | | | | |
| | | 350-356, 368-400, 420-428, 434-443, | | | | |
| | | 471-477, 481-488, 530-535, 540-547, | | | | |
| | | 566-575, 591-601, 603-609, 624-629 | | | | |
| ECs0041 | l-carnitine dehydratase | 9-22, 38-46, 51-61, 66-73, 108-126, | E: 5 | 69-88 | 2 | 302 |
| | | 136-154, 162-169, 177-186, 198-204, | | | | |
| | | 231-254, 256-272, 277-295, 297-311, | | | | |
| | | 314-328, 331-338, 379-385, 393-402 | | | | |
| ECs0063 | probable ATP-dependent | 18-36, 43-53, 80-86, 94-110, 112-118, | P: 2 | 134-148; 525-552; | 3 | 303 |
| | RNA helicase | 152-168, 170-182, 188-198, 200-220, | | 821-920 | | |
| | | 225-230, 237-243, 248-259, 265-289, | | | | |
| | | 298-317, 325-331, 338-344, 349-360, | | | | |
| | | 382-389, 400-407, 413-419, 433-453, | | | | |
| | | 494-501, 503-524, 530-536, 557-565, | | | | |
| | | 574-582, 586-592, 603-629, 631-637, | | | | |
| | | 643-657, 673-680, 699-705, 715-720, | | | | |
| | | 737-754, 764-771, 778-793, 800-844, | | | | |
| | | 853-858, 874-893, 899-905, 915-929, | | | | |
| | | 957-965 | | | | |
| ECs0067 | L-ribulokinase | 11-22, 28-34, 40-45, 65-86, 99-107, | L: 13 | 251-323; | 4 | 304 |
| | | 115-125, 132-141, 143-150, 158-190, | | 368-389 | | |
| | | 203-211, 216-239, 246-257, 259-270, | | | | |
| | | 272-279, 286-306, 313-332, 338-364, | | | | |
| | | 369-380, 387-397, 410-418, 422-435, | | | | |
| | | 449-455, 467-510, 515-521, 532-538, | | | | |
| | | 547-563 | | | | |
| ECs0089 | meso-diaminopimelate- | 7-20, 28-45, 51-66, 81-104, 108-115, | L: 9 | 235-269 | 5 | 305 |
| | adding enzyme | 124-137, 149-155, 161-206, 209-214, | | | | |
| | | 222-239, 250-262, 276-282, 309-343, | | | | |
| | | 351-363, 365-386, 405-413, 435-440, | | | | |
| | | 446-454, 458-466, 470-477, 482-492 | | | | |
| ECs0152 | helicase, ATP-dependent | 12-43, 51-60, 65-74, 76-86, 102-108, | C: 2 | 752-825 | 6 | 306 |
| | | 110-118, 129-139, 146-160, 164-172, | | | | |
| | | 180-192, 195-208, 212-220, 228-250, | | | | |
| | | 252-267, 271-277, 281-288, 296-313, | | | | |
| | | 344-353, 364-379, 381-387, 394-414, | | | | |
| | | 435-443, 451-460, 468-474, 484-491, | | | | |
| | | 500-510, 541-556, 560-586, 604-618, | | | | |
| | | 635-641, 647-657, 668-705, 715-727, | | | | |
| | | 729-734, 740-745, 760-780, 803-809 | | | | |
| ECs0153 | peptidoglycan synthetase | 16-23, 66-90, 98-110, 125-131, 144-150, | A: 1 | 623-653 | 7 | 307 |
| | MrcB | 194-200, 213-219, 221-232, 237-256, | | | | |
| | | 263-281, 293-298, 311-318, 326-337, | | | | |
| | | 339-354, 373-389, 396-402, 404-421, | | | | |
| | | 427-439, 441-448, 452-462, 467-479, | | | | |
| | | 508-530, 534-541, 544-550, 562-569, | | | | |
| | | 575-581, 583-592, 595-628, 636-656, | | | | |
| | | 658-672, 674-680, 687-697, 715-721, | | | | |
| | | 731-736, 739-749, 754-761, 771-788, | | | | |
| | | 790-797, 813-824 | | | | |
| ECs0155 | ATP-binding component | 14-42, 51-57, 66-77, 84-96, 103-111, | B: 2 | 31-133 | 8 | 308 |
| | of hydroxymate- | 129-148, 158-193, 198-208, 212-222, | | | | |
| | dependent iron transport | 242-262 | | | | |
| ECs0156 | ferrichrome-iron transport | 4-23, 36-62, 65-84, 98-104, 128-135, | C: 4 | 119-152 | 9 | 309 |
| | protein fhuD | 144-161, 175-204, 219-240, 250-264, | | | | |
| | | 266-278, 280-290 | | | | |
| ECs0174 | ribosome releasing factor | 13-26, 33-45, 50-60, 75-81, 97-105, | A: 2, B: 2 | 66-170 | 10 | 310 |
| | | 123-131, 138-145, 158-166, 168-177 | | | | |
| ECs0218 | IcmF-like protein | 20-26, 35-50, 52-67, 85-100, 106-149, | C: 9 | 881-924 | 11 | 311 |
| | | 189-199, 202-208, 217-226, 236-244, | | | | |
| | | 270-294, 310-332, 340-347, 350-356, | | | | |
| | | 364-373, 375-380, 401-428, 438-445, | | | | |
| | | 477-493, 513-548, 555-564, 568-596, | | | | |
| | | 600-612, 650-665, 667-674, 680-687, | | | | |
| | | 696-707, 715-722, 728-764, 779-784, | | | | |
| | | 795-809, 813-820, 837-843, 858-864, | | | | |
| | | 885-891, 894-900, 907-917, 922-935, | | | | |
| | | 941-946, 970-977, 979-986, 1022-1032 | | | | |
| ECs0314 | hypothetical protein | 13-21, 48-57, 72-83, 105-119, 125-133, | A: 1 | 277-306 | 12 | 312 |
| | | 146-153, 170-177, 221-239, 245-274, | | | | |
| | | 283-292, 299-305, 317-329, 335-343, | | | | |
| | | 358-367, 374-380, 399-407, 430-438, | | | | |
| | | 449-454, 473-479, 483-505, 517-527, | | | | |
| | | 531-537, 554-560, 586-599, 601-616, | | | | |
| | | 623-629, 639-647, 649-654, 658-667, | | | | |
| | | 669-676, 690-709, 714-729 | | | | |
| ECs0315 | hypothetical protein | 14-28, 34-40, 45-54, 69-83, 86-100, | L: 3 | 104-138 | 13 | 313 |
| | | 116-123, 135-143, 146-161, 168-179, | | | | |
| | | 187-200, 203-225, 237-250, 255-265, | | | | |
| | | 271-292, 298-314 | | | | |
| ECs0320 | putative receptor | 4-28, 36-42, 78-85, 106-122, 130-135, | A: 1 | 448-483 | 14 | 314 |
| | | 144-150, 161-175, 180-190, 194-200, | | | | |
| | | 226-234, 256-265, 274-294, 309-316, | | | | |
| | | 324-333, 373-379, 382-389, 398-404, | | | | |
| | | 407-416, 422-446, 451-462, 530-541 | | | | |
| ECs0321 | putative enzyme | 5-50, 53-64, 75-80, 110-116, 119-125, | E: 14 | 377-400 | 15 | 315 |
| | | 131-148, 150-156, 192-217, 224-229, | | | | |
| | | 260-267, 275-281, 283-300, 305-310, | | | | |
| | | 323-343, 358-365, 400-406, 422-429, | | | | |
| | | 447-464, 498-503, 512-518, 520-526, | | | | |
| | | 530-537, 552-562, 614-623, 697-703, | | | | |
| | | 705-711, 719-727, 729-743, 745-753, | | | | |
| | | 788-796, 802-810, 813-834 | | | | |
| ECs0322 | hypothetical protein | 4-26, 55-61, 64-70, 74-99, 107-119, | C: 3 | 108-137 | 16 | 316 |
| | | 128-134, 137-154, 167-178 | | | | |
| ECs0336 | putative invasin | 12-54, 70-76, 117-125, 135-143, 196-202, | A: 1 | 894-924 | 17 | 317 |
| | | 205-213, 243-261, 263-269, 278-298, | | | | |
| | | 312-318, 320-326, 334-346, 358-368, | | | | |
| | | 377-389, 396-404, 414-423, 429-438, | | | | |
| | | 448-455, 483-490, 540-549, 557-563, | | | | |
| | | 592-599, 601-609, 622-628, 632-653, | | | | |
| | | 656-692, 695-712, 714-730, 760-766, | | | | |
| | | 775-786, 788-803, 807-814, 820-831, | | | | |
| | | 848-854, 875-886, 892-899, 911-917, | | | | |
| | | 919-925, 927-935, 954-974, 980-992, | | | | |
| | | 1017-1026, 1032-1044, 1074-1079, | | | | |
| | | 1082-1089, 1098-1108, 1115-1120, | | | | |
| | | 1129-1137, 1139-1145, 1161-1170, | | | | |
| | | 1189-1195, 1197-1212, 1219-1225, | | | | |
| | | 1234-1250, 1267-1283, 1302-1318, | | | | |
| | | 1321-1329, 1362-1368, 1377-1388, | | | | |
| | | 1395-1408 | | | | |
| ECs0345 | putative iron-sulfur | 58-76, 82-87, 95-103, 107-114, 122-136, | E: 2 | 2-20 | 18 | 318 |
| | protein | 139-148, 150-162, 165-172, 184-190, | | | | |
| | | 203-220, 228-238, 245-258, 260-267, | | | | |
| | | 288-295, 299-328, 333-352, 357-386, | | | | |
| | | 424-429 | | | | |
| ECs0453 | maltodextrin glucosidase | 5-26, 59-66, 68-74, 81-87, 105-116, | G: 2 | 554-596 | 19 | 319 |
| | | 122-232, 144-160, 185-212, 217-223, | | | | |
| | | 228-234, 241-252, 269-274, 291-313, | | | | |
| | | 318-326, 335-342, 352-358, 368-375, | | | | |
| | | 397-404, 411-422, 431-439, 458-472, | | | | |
| | | 474-485, 493-499, 509-519, 521-527, | | | | |
| | | 530-558, 563-579, 590-601 | | | | |
| ECs0454 | hypothetical protein | 6-12, 18-28, 39-45, 69-102, 120-128, | H: 15 | 178-285 | 20 | 320 |
| | | 137-147, 164-170, 173-179, 223-230, | | | | |
| | | 236-254, 265-277, 320-326, 350-368, | | | | |
| | | 376-400, 404-416, 441-448, 462-477 | | | | |
| ECs0541 | hypothetical protein | 4-19, 21-47, 52-57, 59-73, 79-86, 88-95, | A: 3, D: 5 | 179-265, | 21 | 321 |
| | | 100-108, 114-129, 136-143, 145-151, | | 1343-1368 | | |
| | | 176-182, 235-242, 248-258, 273-281, | | | | |
| | | 301-308, 310-316, 329-340, 347-354, | | | | |
| | | 363-380, 384-400, 407-415, 430-441, | | | | |
| | | 469-480, 491-504, 507-526, 530-540, | | | | |
| | | 547-554, 563-579, 609-617, 620-626, | | | | |
| | | 630-636, 643-655, 665-680, 706-714, | | | | |
| | | 718-725, 729-740, 747-754, 756-779, | | | | |
| | | 790-803, 806-816, 818-824, 829-840, | | | | |
| | | 842-853, 862-877, 901-912, 928-939, | | | | |
| | | 941-952, 961-978, 988-999, 1026-1037, | | | | |
| | | 1067-1078, 1080-1087, 1089-1098, | | | | |
| | | 1104-1115, 1117-1124, 1128-1139, | | | | |
| | | 1143-1151, 1155-1176, 1180-1186, | | | | |
| | | 1205-1211, 1218-1224, 1228-1242, | | | | |
| | | 1244-1251, 1258-1278, 1280-1287, | | | | |
| | | 1290-1298, 1304-1326, 1331-1341, | | | | |
| | | 1363-1378, 1392-1399, 1407-1415, | | | | |
| | | 1430-1443, 1445-1454 | | | | |
| ECS0548 | adhesin/invasin-like | 4-24, 31-37, 61-75, 83-89, 94-102, 117-123, | H: 2 | 238-319 | 22 | 322 |
| | protein | 130-143, 184-191, 203-210, 212-228, | | | | |
| | | 270-284, 286-292, 301-307, 312-319, | | | | |
| | | 329-335 | | | | |
| ECs0557 | putative ATP-binding | 4-16, 22-35, 39-44, 50-59, 65-73, 86-104, | E: 2 | 102-120 | 23 | 323 |
| | component of a transport | 108-117, 128-137, 139-147, 153-159, | | | | |
| | system | 165-171, 185-192, 198-223 | | | | |
| ECs0565 | putative transcriptional | 8-16, 23-30, 32-40, 45-50, 61-68, 81-89, | P: 2 | 265-282 | 24 | 324 |
| | regulator LYSR-type | 91-114, 121-129, 131-149, 161-185, | | | | |
| | | 191-200, 217-224, 229-249, 253-262, | | | | |
| | | 266-273, 282-289, 297-303 | | | | |
| ECs0594 | putative outer membrane | 10-48, 64-71, 81-88, 100-112, 130-140, | P: 3 | 178-193 | 25 | 325 |
| | protein | 153-170, 177-184, 197-202, 236-250, | | | | |
| | | 266-272, 284-292, 294-300, 306-318, | | | | |
| | | 320-326, 346-357, 379-387, 389-396, | | | | |
| | | 405-416, 424-435, 447-453, 474-483, | | | | |
| | | 501-510, 529-536, 550-568, 582-594, | | | | |
| | | 606-611, 625-631, 633-645, 664-672, | | | | |
| | | 685-692, 703-711, 730-745, 761-775, | | | | |
| | | 782-790, 792-804, 816-825, 827-834, | | | | |
| | | 840-866 | | | | |
| ECs0600 | bacteriophage N4 | 11-25, 39-57, 69-94, 100-107, 118-155, | C: 10, G: 6, H: 3 | 88-167, 804-839, | 26 | 326 |
| | adsorption protein NfrA | 158-171, 189-201, 226-233, 236-245, | | | | |
| | | 249-263, 268-277, 287-312, 315-329, | | | | |
| | | 333-342, 351-357, 364-374, 382-388, | | | | |
| | | 399-407, 419-449, 454-471, 486-492, | | | | |
| | | 494-504, 515-541, 547-552, 578-600, | | | | |
| | | 611-623, 625-641, 651-657, 678-692, | | | | |
| | | 699-709, 713-720, 746-752, 772-781, | | | | |
| | | 791-801, 829-844, 880-893, 900-910, | | | | |
| | | 915-923, 936-942, 953-970 | | | | |
| ECs0602 | H repeat-associated | 6-16, 19-40, 55-61, 67-92, 103-108, | E: 8 | 281-297 | 27 | 327 |
| | protein | 125-142, 154-162, 190-196, 236-247, | | | | |
| | | 257-272, 280-290, 310-320, 331-343, | | | | |
| | | 367-375 | | | | |
| ECs0605 | Rhs core protein with | 42-48, 63-116, 151-172, 181-187, 189-196, | E: 52 | 717-741 | 28 | 328 |
| | extension | 200-205, 217-232, 256-261, 288-319, | | | | |
| | | 326-352, 360-374, 380-404, 412-435, | | | | |
| | | 453-466, 474-485, 500-507, 514-519, | | | | |
| | | 525-530, 558-564, 568-582, 590-595, | | | | |
| | | 600-610, 633-640, 666-671, 694-702, | | | | |
| | | 715-722, 730-737, 757-768, 774-785, | | | | |
| | | 820-827, 832-848, 873-878, 883-890, | | | | |
| | | 906-915, 918-930, 937-944, 948-956, | | | | |
| | | 960-966, 970-978, 1023-1040, | | | | |
| | | 1049-1056, 1065-1071, 1085-1090, | | | | |
| | | 1105-1117, 1122-1132, 1165-1171, | | | | |
| | | 1186-1195, 1210-1216, 1309-1342, | | | | |
| | | 1345-1352, 1354-1360, 1375-1385, | | | | |
| | | 1400-1407, 1414-1421, 1430-1439, | | | | |
| | | 1446-1467, 1479-1485, 1522-1530, | | | | |
| | | 1565-1572, 1577-1586, 1596-1608 | | | | |
| ECs0689 | putative dnaK protein | 5-11, 17-24, 26-32, 36-43, 50-61, 67-73, | C: 9, D: 7, E5 | 36-133 | 29 | 329 |
| | | 91-102, 111-126, 133-148, 154-161, | | | | |
| | | 167-173, 179-195, 208-223, 230-252, | | | | |
| | | 270-286, 292-306, 308-347, 352-371, | | | | |
| | | 373-380, 386-395, 404-410, 418-431, | | | | |
| | | 436-444, 447-460, 463-477, 486-492, | | | | |
| | | 522-533, 545-553 | | | | |
| ECs0776 | peptidoglycan-associated | 4-23, 68-78, 100-107, 135-149, 152-159 | F: 15 | 1-88 | 30 | 330 |
| | lipoprotein | | | | | |
| ECs0819 | endolysin | 5-12, 18-27, 35-55, 68-95, 100-109, | B: 2 | 37-98 | 31 | 331 |
| | | 117-122, 129-135, 157-162 | | | | |
| ECs0855 | putative enzyme BioC | 5-52, 64-80, 86-106, 108-155, 175-190, | P: 2 | 53-70 | 32 | 332 |
| | | 223-231, 234-248 | | | | |
| ECs0872 | putative ATP-binding | 25-46, 59-64, 69-75, 83-90, 93-100, | C: 2, E: 3, G: 5, | 226-275 | 33 | 333 |
| | component of a transport | 107-115, 124-135, 151-177, 183-189, | N: 4 | | | |
| | system | 194-206, 209-215, 219-224, 251-263, | | | | |
| | | 267-276, 305-311, 318-327, 332-338, | | | | |
| | | 350-356, 380-396, 406-412, 414-423, | | | | |
| | | 431-437, 453-461, 463-481, 483-491, | | | | |
| | | 505-510, 513-523, 528-545, 568-575 | | | | |
| ECs0880 | hypothetical protein | 5-29, 37-43, 47-54, 61-70 | E: 3 | 31-65 | 34 | 334 |
| ECs0883 | putative outer membrane | 10-35, 42-59, 65-70, 76-85, 92-104, | A: 1 | 547-572 | 35 | 335 |
| | receptor for iron | 149-155, 184-191, 234-243, 248-259, | | | | |
| | transporter | 268-277, 383-389, 391-398, 410-430, | | | | |
| | | 445-454, 488-504, 518-523, 530-538, | | | | |
| | | 574-590, 615-623, 627-633, 652-660, | | | | |
| | | 662-670, 674-683, 703-714, 720-728, | | | | |
| | | 731-737, 751-757 | | | | |
| ECs0931 | modulator of drug activity A | 5-12, 39-51, 57-64, 67-84, 86-108, 124-130, | A: 1, H: 2 | 133-214 | 36 | 336 |
| | | 138-159, 167-179, 181-202, 226-235 | | | | |
| Ecs0954 | putative epimerase or | 12-20, 29-40, 57-77, 79-88, 97-103, | A: 2 | 23-54 | 37 | 337 |
| | dehydratase (lies outside | 111-117, 119-137, 174-200, 202-218, | | | | |
| | the ORF) | 221-229, 231-238, 240-246, 254-264, | | | | |
| | | 266-280, 296-308, 321-331 | | | | |
| ECs0987 | putative formate | 7-17, 19-54, 66-101, 114-133, 146-182, | C: 4 | 1-31 | 38 | 338 |
| | transporter FocA | 193-210, 219-226, 232-238, 244-250, | | | | |
| | | 253-261, 266-279 | | | | |
| ECs1044 | hypothetical protein | 4-11, 17-32, 38-58, 68-111, 113-130, | A: 1 | 661-695 | 39 | 339 |
| | | 132-186, 200-212, 219-227, 240-249, | | | | |
| | | 256-265, 270-278, 285-305, 311-317, | | | | |
| | | 328-341, 343-351, 373-386, 389-414, | | | | |
| | | 419-433, 439-504, 510-535, 553-564, | | | | |
| | | 588-594, 599-604, 609-618, 620-631, | | | | |
| | | 635-657, 664-670, 684-703, 705-717 | | | | |
| ECs1140 | hypothetical protein | 5-33, 67-78, 122-129, 141-150, 172-185, | E: 2, | 70-85, 271-403 | 40 | 340 |
| | | 201-209, 217-223, 235-252, 289-295, | | | | |
| | | 303-316, 355-368, 383-389, 398-406, | | | | |
| | | 426-437, 445-451, 459-467, 479-496, | | | | |
| | | 512-517, 523-530, 535-562, 577-584, | | | | |
| | | 590-605, 610-616, 618-632, 644-654, | | | | |
| | | 663-669, 680-688 | | | | |
| ECs1392 | hypothetical protein | 4-53, 55-62 | E: 2 | 59-71 | 41 | 341 |
| ECs1433 | hypothetical protein | 26-38, 43-63, 67-76, 78-98, 105-112, | G: 3 | 231-283 | 42 | 342 |
| | | 115-121, 132-144, 148-153, 179-184, | | | | |
| | | 194-203, 239-245, 261-278, 282-315 | | | | |
| ECs1462 | RNase E | 13-22, 24-30, 49-61, 65-72, 90-97, 99-105, | C: 1, D: 6 | 571-665 | 43 | 343 |
| | | 115-131, 152-160, 165-171, 176-188, | | | | |
| | | 202-221, 231-250, 255-274, 280-286, | | | | |
| | | 288-296, 331-337, 339-347, 350-358, | | | | |
| | | 374-385, 391-408, 418-427, 438-453, | | | | |
| | | 468-476, 482-490, 497-506, 526-532, | | | | |
| | | 534-583, 696-702, 713-719, 730-748, | | | | |
| | | 750-758, 762-776, 802-808, 825-857, | | | | |
| | | 864-950, 963-1004, 1015-1023, | | | | |
| | | 1046-1058 | | | | |
| ECs1638 | minor tail protein | 5-13, 18-24, 29-45, 51-58, 78-85, 87-94, | P: 3 | 1-83 | 44 | 344 |
| | | 109-117, 122-128, 146-161, 175-189 | | | | |
| ECs1643 | tail length tape measure | 5-17, 40-46, 50-65, 73-86, 89-98, 114-139, | B: 9, | 204-283, 287-363 | 45 | 345 |
| | protein precursor | 151-157, 165-173, 186-195, 197-213, | | | | |
| | | 215-227, 245-260, 310-315, 364-369, | | | | |
| | | 405-415, 428-436, 456-464, 471-482, | | | | |
| | | 507-514, 518-531, 539-565, 648-654, | | | | |
| | | 681-687, 690-707, 720-731, 743-756, | | | | |
| | | 764-771, 801-806, 815-828, 830-836 | | | | |
| ECs1646 | tail assembly protein | 6-27, 33-40, 62-78, 83-89, 91-99, 102-109, | E: 2 | 109-127 | 46 | 346 |
| | | 115-134, 150-156, 160-170, 172-204, | | | | |
| | | 233-244 | | | | |
| ECs1650 | putative tail fiber protein | 4-11, 17-25, 31-38, 55-80, 105-113, | A: 3, M: 2 | 192-275, 394-430 | 47 | 347 |
| | | 115-123, 160-171, 195-201, 210-222, | | | | |
| | | 254-264, 290-296, 301-310, 315-321, | | | | |
| | | 329-334, 349-358, 377-394, 403-409, | | | | |
| | | 424-432, 452-460, 466-474, 480-495, | | | | |
| | | 510-516, 527-539, 554-562, 568-579, | | | | |
| | | 587-592, 599-608, 627-635, 637-646, | | | | |
| | | 661-668, 702-709, 723-736, 744-766, | | | | |
| | | 768-778, 785-802, 815-821, 828-835, | | | | |
| | | 862-868, 876-888, 892-906, 908-918, | | | | |
| | | 921-950 | | | | |
| ECs1736 | hypothetical protein | 18-26, 33-78, 80-87, 120-128, 141-182, | C: 2 | 208-230 | 48 | 348 |
| | | 184-208, 251-257, 269-300, 305-311 | | | | |
| ECs1752 | energy transducer TonB | 11-72, 84-91, 99-109, 112-120, 143-155, | M: 24, H: 7, | 30-176 | 49 | 349 |
| | | 162-183, 188-197, 222-231 | | | | |
| ECs1905 | putative carboxypeptidase | 4-17, 41-56, 61-67, 74-109, 142-149, | G: 7, N: 5 | 84-162 | 50 | 350 |
| | | 158-185, 193-210, 216-236, 241-249 | | | | |
| ECs2026 | methyl-accepting | 8-45, 135-140, 176-182, 189-196, 206-216, | H: 2 | 104-180 | 51 | 351 |
| | chemotaxis protein III | 218-235, 260-269, 272-278, 307-313, | | | | |
| | | 331-344, 352-359, 371-395, 403-414, | | | | |
| | | 416-422, 426-438, 451-470, 478-484, | | | | |
| | | 493-502, 504-511, 514-525, 527-534, | | | | |
| ECs2036 | hypothetical protein | 6-25, 49-59, 65-94, 107-115, 117-124, | G: 8 | 145-173 | 52 | 352 |
| | | 135-151, 176-185, 203-209 | | | | |
| ECs2037 | hypothetical protein | 5-15, 46-56, 58-81, 83-111, 118-138, | G: 4 | 9-46 | 53 | 353 |
| | | 146-158, 165-175 | | | | |
| ECs2044 | putative transport protein | 7-15, 36-43, 54-60, 65-73, 88-94, 107-113, | A: 3 | 100-141 | 54 | 354 |
| | | 122-128, 134-141, 162-171, 182-216, | | | | |
| | | 218-235, 249-258, 266-278, 290-301, | | | | |
| | | 308-338, 362-368 | | | | |
| ECs2048 | putative aldehyde | 4-14, 19-24, 27-36, 38-51, 59-73, 90-96, | L: 3 | 327-355 | 55 | 355 |
| | dehydrogenase | 102-121, 138-150, 157-174, 176-202, | | | | |
| | | 212-225, 229-241, 250-258, 261-268, | | | | |
| | | 279-291, 293-310, 319-338, 358-368, | | | | |
| | | 371-389, 393-398, 404-413, 416-433, | | | | |
| | | 435-442, 458-471 | | | | |
| ECs2062 | H repeat-associated | 10-15, 32-49, 61-69, 97-103, 128-134, | E: 8 | 99-124 | 56 | 356 |
| | protein | 143-154, 164-179 | | | | |
| ECs2091 | putative hemin-binding | 6-37, 40-48, 56-68, 108-127, 135-141, | A: 1 | 434-465 | 57 | 357 |
| | lipoprotein | 145-163, 170-179, 207-216, 224-234, | | | | |
| | | 238-244, 249-261, 266-283, 352-363, | | | | |
| | | 371-378, 380-392, 447-454, 468-489, | | | | |
| | | 497-503, 505-510 | | | | |
| ECs2099 | putative peptidase | 6-33, 46-68, 78-84, 120-131, 135-142, | E: 2 | 406-428 | 58 | 358 |
| | | 183-188, 201-219, 227-233, 236-244, | | | | |
| | | 246-252, 282-295, 307-315, 335-350, | | | | |
| | | 392-399, 409-414, 427-433, 435-447, | | | | |
| | | 468-482, 487-494, 500-506, 529-537, | | | | |
| | | 543-550, 555-575, 577-584, 606-611, | | | | |
| | | 619-625, 637-651, 682-711, 713-727, | | | | |
| | | 729-738, 756-764, 783-795, 801-815, | | | | |
| | | 817-830, 833-847, 861-890, 898-904, | | | | |
| | | 909-928 | | | | |
| ECs2178 | putative head-to-tail | 7-17, 36-53 | P: 14 | 41-65 | 59 | 359 |
| | joining protein | | | | | |
| ECs2330 | putative aminotransferase | 4-10, 17-24, 28-34, 42-49, 55-61, 70-106, | N: 2 | 258-268 | 60 | 360 |
| | | 112-127, 135-142, 154-172, 178-184, | | | | |
| | | 187-201, 213-219, 225-230, 235-246, | | | | |
| | | 253-260, 267-302, 318-331, 339-353, | | | | |
| | | 363-373, 376-387 | | | | |
| ECs2362 | probable ATP-dependent | 8-17, 29-43, 45-52, 58-69, 87-100, 102-111, | G: 6 | 611-689 | 61 | 361 |
| | helicase Lhr | 148-163, 172-187, 190-208, 210-227, | | | | |
| | | 232-239, 245-253, 258-263, 286-299, | | | | |
| | | 313-334, 346-362, 373-388, 391-411, | | | | |
| | | 425-430, 434-446, 457-489, 496-502, | | | | |
| | | 518-524, 537-546, 555-560, 602-610, | | | | |
| | | 637-646, 676-689, 698-704, 706-742, | | | | |
| | | 750-778, 780-791, 806-842, 864-879, | | | | |
| | | 881-888, 890-899, 901-908, 910-921, | | | | |
| | | 941-947, 953-959, 967-980, 990-995, | | | | |
| | | 1000-1061, 1073-1079, 1081-1092, | | | | |
| | | 1096-1118, 1121-1185, 1195-1209, | | | | |
| | | 1219-1232, 1237-1243, 1250-1274, | | | | |
| | | 1276-1282, 1302-1317, 1324-1333, | | | | |
| | | 1339-1344, 1349-1361, 1370-1376, | | | | |
| | | 1406-1413, 1415-1427, 1433-1450, | | | | |
| | | 1453-1469, 1473-1478, 1482-1495, | | | | |
| | | 1509-1517, 1519-1526 | | | | |
| ECs2364 | putative lipoprotein | 7-29, 74-83, 101-107, 115-124, 127-142, | E: 2 | 40-60 | 62 | 362 |
| | | 166-184, 209-215, 222-232, 245-252, | | | | |
| | | 255-262 | | | | |
| ECs2389 | putative ATP-binding | 4-14, 16-32, 42-47, 65-71, 82-109, 128-145, | C: 2 | 138-167 | 63 | 363 |
| | component of a transport | 158-171, 177-191, 197-228, 230-236, | | | | |
| | system | | | | | |
| ECs2394 | putative oxidase | 4-22, 47-59, 61-71, 76-82, 96-103, 119-146, | D: 7 | 943-1016 | 64 | 364 |
| | | 165-172, 174-188, 191-202, 214-232, | | | | |
| | | 240-247, 267-273, 278-293, 303-323, | | | | |
| | | 326-340, 348-353, 365-387, 389-398, | | | | |
| | | 405-411, 416-421, 423-451, 453-480, | | | | |
| | | 482-495, 507-512, 518-529, 537-545, | | | | |
| | | 563-570, 581-587, 591-597, 611-624, | | | | |
| | | 626-634, 637-647, 671-692, 694-725, | | | | |
| | | 735-742, 747-768, 786-825, 859-875, | | | | |
| | | 887-894, 897-909, 915-938, 943-954, | | | | |
| | | 967-976, 984-1001, 1006-1015 | | | | |
| ECs2467 | NADP-specific glutamate | 4-14, 24-34, 47-69, 81-90, 98-112, 144-153, | G: 23, N: 5 | 361-403 | 65 | 365 |
| | dehydrogenase | 161-169, 189-196, 202-208, 213-220, | | | | |
| | | 243-249, 256-262, 265-271, 279-285, | | | | |
| | | 299-307, 310-324, 326-345, 356-369, | | | | |
| | | 397-416, 424-429, 432-441 | | | | |
| ECs2491 | putative scaffolding | 4-22, 27-40, 44-54, 77-91, 112-127, | P: 3 | 171-210 | 66 | 366 |
| | protein in the formation of | 155-161, 196-207, 210-216, 228-234 | | | | |
| | a murein-synthesizing | | | | | |
| | holoenzyme | | | | | |
| ECs2527 | mannose-specific PTS | 4-9, 14-23, 50-56, 59-68, 77-102, 111-120, | C: 4 | 113-157 | 67 | 367 |
| | enzyme IIAB | 126-152, 161-167, 174-180, 189-202, | | | | |
| | | 204-228, 237-245, 259-266, 278-285, | | | | |
| | | 300-309 | | | | |
| ECs2540 | carboxy-terminal protease | 6-26, 31-37, 41-47, 62-69, 71-93, 106-119, | Q: 7 | 517-643 | 68 | 368 |
| | for penicillin-binding | 126-136, 167-180, 196-202, 210-216, | | | | |
| | protein 3 | 242-254, 258-264, 272-286, 292-298, | | | | |
| | | 300-309, 312-322, 346-352, 354-380, | | | | |
| | | 385-392, 401-420, 434-449, 451-459, | | | | |
| | | 465-473, 497-514, 555-562, 566-574, | | | | |
| | | 604-612, 642-648, 657-669 | | | | |
| ECs2662 | flagellin | 23-35, 71-77, 94-100, 134-140, 157-168 | B: 2, D: 3, H: 12 | 11-149, 507-557 | 69 | 369 |
| | | 185-191, 228-237, 255-265, 269-283, | | | | |
| | | 310-315, 334-340, 366-392, 395-400, | | | | |
| | | 404-411, 423-428, 434-445, 451-458, | | | | |
| | | 468-478, 496-508, 512-519, 558-563, | | | | |
| | | 565-582 | | | | |
| ECs2670 | hypothetical protein | 14-20, 35-48, 53-63, 71-77, 95-101, | G: 4 | 23-52 | 70 | 370 |
| | | 114-121, 123-130, 144-151, 153-160, | | | | |
| | | 162-170, 187-197, 201-211 | | | | |
| ECs2676 | flagellar hook-basal body | 7-17, 24-44, 63-70, 88-99 | G: 7, L: 3, N: 4, | 1-78 | 71 | 371 |
| | complex protein FliE | | P: 6 | | | |
| ECs2699 | DNA cytosine methylase | 21-39, 46-53, 68-96, 107-113, 118-124, | L: 12, P: 11 | 92-170, 178-199 | 72 | 372 |
| | | 126-135, 158-185, 196-202, 204-213, | | | | |
| | | 219-226, 246-253, 267-275, 277-285, | | | | |
| | | 299-317, 319-338, 404-410, 421-428, | | | | |
| | | 435-463 | | | | |
| Ecs2776 | hypothetical protein | 28-43, 47-55, 59-68, 72-79, 106-112, | E: 2, L: 5 | 403-455 | 73 | 373 |
| | | 121-139, 151-160, 168-175, 177-183, | | | | |
| | | 194-212, 223-229, 232-248, 254-263, | | | | |
| | | 270-276, 317-323, 331-338, 342-356, | | | | |
| | | 363-369, 378-391, 415-424, 432-441, | | | | |
| | | 443-456, 464-470, 499-505, 521-527, | | | | |
| | | 534-552, 586-599, 624-634, 639-647, | | | | |
| | | 651-667, 685-690, 694-702, 711-731, | | | | |
| | | 733-744, 752-776, 784-791, 801-807, | | | | |
| | | 837-859, 879-890, 906-914, 918-924, | | | | |
| | | 926-940, 945-958, 965-971, 980-1002, | | | | |
| | | 1010-1016, 1018-1028, 1034-1044, | | | | |
| | | 1046-1053, 1065-1075, 1079-1092, | | | | |
| | | 1095-1104, 1125-1142, 1154-1162, | | | | |
| | | 1176-1181, 1194-1207, 1233-1244, | | | | |
| | | 1252-1261, 1267-1274, 1283-1288, | | | | |
| | | 1318-1324, 1327-1342 | | | | |
| ECs2865 | hypothetical protein | 17-25, 32-77, 82-91, 100-128, 163-169, | H: 7 | 290-399 | 74 | 374 |
| | | 189-207, 211-218, 227-232, 239-245, | | | | |
| | | 255-260, 278-300, 311-325, 342-356, | | | | |
| | | 382-390, 393-401, 416-460, 467-487, | | | | |
| | | 491-497, 505-512, 516-532, 551-565, | | | | |
| | | 568-575, 594-601, 610-632, 638-643, | | | | |
| | | 647-670, 672-685, 699-710, 712-726 | | | | |
| ECs2882 | putative membrane | 4-39, 56-73, 107-128, 134-142, 144-153, | E: 14 | 177-199 | 75 | 375 |
| | protein | 155-183, 198-203, 205-212, 215-223, | | | | |
| | | 232-244, 248-265, 273-292, 294-301, | | | | |
| | | 304-311, 322-329, 338-343, 369-378, | | | | |
| | | 397-404, 408-416, 420-426, 436-443 | | | | |
| ECs3019 | beta-D-glucoside | 4-22, 25-31, 35-41, 53-61, 74-83, 101-145, | M: 4, Q: 2 | 393-543 | 76 | 376 |
| | glucohydrolase | 157-162, 199-216, 247-257, 266-276, | | | | |
| | | 282-289, 291-298, 306-313, 324-335, | | | | |
| | | 345-353, 360-368, 392-400, 404-421, | | | | |
| | | 432-445, 455-462, 478-486, 494-499, | | | | |
| | | 501-511, 525-551, 554-561, 581-588, | | | | |
| | | 600-613, 637-661, 669-676, 684-697, | | | | |
| | | 699-705, 720-730, 746-751 | | | | |
| ECs3081 | putative ATP-binding | 11-25, 65-79, 89-97, 106-112, 115-121, | C: 6 | 635-686 | 77 | 377 |
| | component of a transport | 126-132, 134-141, 218-230, 255-260, | | | | |
| | system | 287-294, 304-309, 328-334, 339-345, | | | | |
| | | 347-363, 366-382, 421-428, 457-463, | | | | |
| | | 471-477, 484-492, 504-511, 513-518, | | | | |
| | | 547-554, 559-572, 598-604, 617-628, | | | | |
| | | 641-647, 658-665, 691-696, 701-714, | | | | |
| | | 744-751, 760-770, 774-780, 792-801, | | | | |
| | | 805-817 | | | | |
| ECs3103 | hypothetical protein | 5-25, 31-39, 72-79, 93-102, 104-110, | A: 2 | 74-108 | 78 | 378 |
| | | 122-132, 138-146, 157-189, 192-198, | | | | |
| | | 205-214, 226-233, 240-248, 269-275, | | | | |
| | | 282-298, 304-310, 313-327, 342-348 | | | | |
| ECs3111 | putative membrane | 7-34, 44-50, 54-64, 90-99, 101-106, | C: 3 | 1352-1387 | 79 | 379 |
| | protein | 111-123, 156-175, 182-212, 224-232, | | | | |
| | | 235-247, 249-264, 266-273, 306-321, | | | | |
| | | 326-333, 343-351, 359-365, 370-403, | | | | |
| | | 424-455, 466-477, 481-495, 503-511, | | | | |
| | | 516-531, 534-543, 555-573, 578-600, | | | | |
| | | 638-650, 657-671, 677-682, 686-692, | | | | |
| | | 698-710, 721-729, 732-741, 752-763, | | | | |
| | | 773-784, 786-809, 816-821, 829-849, | | | | |
| | | 885-894, 911-920, 931-940, 942-949, | | | | |
| | | 954-962, 979-986, 988-995, 1007-1016, | | | | |
| | | 1034-1039, 1060-1065, 1076-1093, | | | | |
| | | 1131-1137, 1144-1152, 1160-1165, | | | | |
| | | 1170-1181, 1186-1196, 1220-1260, | | | | |
| | | 1271-1280, 1287-1295, 1318-1328, | | | | |
| | | 1346-1356, 1361-1367, 1378-1392, | | | | |
| | | 1401-1407, 1412-1420, 1426-1443, | | | | |
| | | 1478-1489, 1491-1499, 1501-1525 | | | | |
| ECs3114 | DNA gyrase, subunit A, | 18-53, 64-93, 95-105, 124-135, 143-148, | D: 37 | 7-84 | 80 | 380 |
| | type II topoisomerase | 155-161, 163-171, 184-198, 238-245, | | | | |
| | | 258-271, 273-284, 287-292, 302-310, | | | | |
| | | 312-320, 322-341, 349-365, 377-403, | | | | |
| | | 407-414, 417-423, 444-453, 455-469, | | | | |
| | | 471-495, 503-511, 536-557, 579-586, | | | | |
| | | 588-609, 619-626, 632-638, 643-649, | | | | |
| | | 656-663, 669-680, 682-688, 699-714, | | | | |
| | | 729-739, 755-761, 768-776, 781-793, | | | | |
| | | 801-815, 821-826, 833-842, 863-869 | | | | |
| ECs3126 | anaerobic sn-glycerol-3- | 8-15, 24-40, 51-65, 78-89, 102-111, | G: 10 | 1-26 | 81 | 381 |
| | phosphate dehydrogenase | 117-154, 164-177, 181-192, 198-209, | | | | |
| | la | 216-222, 230-237, 241-248, 254-268, | | | | |
| | | 285-293, 298-321, 331-338, 366-373, | | | | |
| | | 379-389, 392-415, 429-439, 441-451, | | | | |
| | | 453-459, 471-486, 489-501, 524-535 | | | | |
| ECs3137 | hypothetical protein | 10-18, 26-38, 48-54, 60-69, 77-83, 88-95, | C: 4 | 64-88 | 82 | 382 |
| | | 119-126, 133-169, 172-185, 193-206, | | | | |
| | | 214-225, 236-250, 255-261, 269-275, | | | | |
| | | 278-301, 320-329, 336-341, 345-353, | | | | |
| | | 356-369, 389-397 | | | | |
| ECs3205 | cell division protein | 27-32, 37-50, 68-82, 84-108, 134-145, | A: 2 | 86-134 | 83 | 383 |
| | | 147-154, 162-170, 172-182, 194-200, | | | | |
| | | 205-224, 232-270, 293-299, 312-328 | | | | |
| ECs3213 | chorismate synthase | 7-13, 18-44, 64-74, 81-86, 94-104, 134-148, | C: 2 | 100-141 | 84 | 384 |
| | | 153-159, 174-183, 204-225, 228-243, | | | | |
| | | 248-255, 283-295, 297-303, 320-347 | | | | |
| ECs3221 | putative outer membrane | 4-27, 36-42, 55-62, 64-73, 92-106, 112-118, | F: 1 | 344-369 | 85 | 385 |
| | protein | 120-127, 135-154, 170-179, 242-257, | | | | |
| | | 270-277, 286-325, 335-341, 359-365, | | | | |
| | | 381-387, 410-440, 470-478, 520-528, | | | | |
| | | 543-553, 575-582, 603-612, 617-623, | | | | |
| | | 628-649, 657-663, 685-691, 693-699, | | | | |
| | | 703-708, 712-719, 740-747, 755-763, | | | | |
| | | 766-782, 800-809, 811-833, 835-851, | | | | |
| | | 856-862, 864-876 | | | | |
| ECs3225 | putative acyltransferase | 4-10, 15-24, 26-53, 55-71, 78-83, 90-113, | A: 1 | 204-232 | 86 | 386 |
| | | 128-148, 156-163, 165-179, 203-213, | | | | |
| | | 228-239, 250-259, 277-285, 292-314, | | | | |
| | | 322-330, 334-340, 345-360, 381-396, | | | | |
| | | 404-409, 416-427 | | | | |
| ECs3264 | hypothetical protein | 4-17, 21-30, 42-49, 56-63, 67-73, 78-87, | N: 2 | 104-126 | 87 | 387 |
| | | 92-99, 105-111, 122-130, 151-160, 168-197, | | | | |
| | | 209-226, 243-276, 286-293, 295-301, | | | | |
| | | 306-319, 322-332, 335-342 | | | | |
| ECs3265 | putative peptidase | 4-10, 12-23, 28-34, 37-60, 65-84, 97-103, | M: 7, Q: 21 | 300-362 | 88 | 388 |
| | | 113-127, 135-143, 182-187, 200-223, | | | | |
| | | 227-233, 236-271, 274-279, 282-287, | | | | |
| | | 293-299, 314-329, 334-358 | | | | |
| ECs3322 | hypothetical protein | 20-32, 37-46, 48-65, 75-83, 86-95, 121-133, | A: 2, G: 7 | 1-38 | 89 | 389 |
| | | 138-151, 183-190, 199-205, 216-227 | | | | |
| ECs3330 | putative oxidoreductase | 9-25, 29-48, 50-100, 102-126, 131-149, | A: 3, | 506-577 | 90 | 390 |
| | Fe—S subunit | 167-173, 210-217, 224-256, 259-270, | | | | |
| | | 275-292, 295-301, 308-313, 319-335, | | | | |
| | | 337-359, 362-382, 393-423, 436-449, | | | | |
| | | 468-476, 481-487, 492-500, 526-534, | | | | |
| | | 537-548, 560-567, 569-579, 590-598, | | | | |
| | | 604-613, 629-636, 644-656 | | | | |
| ECs3378 | putative membrane | 25-45, 53-78, 80-102, 116-128, 161-167, | P: 10 | 214-233 | 91 | 391 |
| | protein | 180-186, 193-219, 235-258, 261-268, | | | | |
| | | 291-318 | | | | |
| ECs3386 | hypothetical protein | 4-18, 25-31, 33-39, 47-53, 64-92, 97-106, | A: 2 | 299-326 | 92 | 392 |
| | | 123-129, 134-146, 165-171, 173-190, | | | | |
| | | 192-213, 226-239, 251-273, 283-298, | | | | |
| | | 316-324, 339-345, 350-356, 361-376, | | | | |
| | | 400-408, 418-440, 444-451, 476-481, | | | | |
| | | 505-516, 524-542, 555-563, 581-594, | | | | |
| | | 607-629, 634-641, 647-670, 711-719, | | | | |
| | | 728-738, 755-765, 772-780, 800-815, | | | | |
| | | 822-833, 842-852, 860-865, 874-880, | | | | |
| | | 891-913, 926-938, 941-946, 961-978, | | | | |
| | | 984-990, 1013-1024, 1052-1092, | | | | |
| | | 1099-1111, 1120-1140, 1153-1168, | | | | |
| | | 1170-1190, 1193-1211, 1221-1233, | | | | |
| | | 1253-1264, 1268-1274, 1283-1289, | | | | |
| | | 1295-1300, 1303-1327, 1338-1351, | | | | |
| | | 1362-1368, 1391-1396, 1403-1416, | | | | |
| | | 1429-1436, 1471-1477, 1483-1513, | | | | |
| | | 1526-1555, 1585-1591, 1596-1630, | | | | |
| | | 1632-1639 | | | | |
| ECs3414 | putative LACI-type | 10-25, 34-54, 57-67, 77-96, 111-121, | G: 3, H: 6 | 156-268 | 93 | 393 |
| | transcriptional regulator | 127-139, 151-157, 161-179, 183-198, | | | | |
| | | 201-219, 233-239, 247-252, 268-276, | | | | |
| | | 283-294, 299-309, 319-324 | | | | |
| ECs3415 | hypothetical protein | 6-28, 34-45, 64-79, 88-95, 98-115, 120-141, | C: 4 | 934-1003 | 94 | 394 |
| | | 159-167, 174-179, 186-192, 198-208, | | | | |
| | | 216-225, 232-246, 248-273, 275-283, | | | | |
| | | 291-299, 304-316, 370-381, 386-393, | | | | |
| | | 401-417, 421-445, 460-468, 470-487, | | | | |
| | | 497-509, 511-535, 542-558, 564-574, | | | | |
| | | 603-609, 619-648, 661-675, 682-694, | | | | |
| | | 720-738, 742-759, 762-788, 793-805, | | | | |
| | | 825-851, 885-893, 898-906, 918-935, | | | | |
| | | 941-953, 971-978, 986-993, 1001-1017, | | | | |
| | | 1019-1026, 1050-1070, 1072-1089, | | | | |
| | | 1097-1102, 1107-1121 | | | | |
| ECs3431 | RecO protein | 6-13, 31-38, 47-60, 71-102, 107-124, | N: 3, P: 10 | 202-243 | 95 | 395 |
| | | 128-155, 173-180, 213-220 | | | | |
| ECs3515 | putative ATP-binding | 4-38, 49-71, 75-85, 110-115, 168-173, | A: 2, C: 1, F: 7, | 454-483, | 96 | 396 |
| | component of a transport | 202-210, 221-228, 240-245, 258-264, | L: 26, M: 6, | 1142-1349 | | |
| | system | 302-316, 348-362, 386-391, 456-462, | P: 4, Q: 13 | | | |
| | | 474-483, 494-499, 511-516, 523-528, | | | | |
| | | 533-539, 549-557, 579-585, 587-593, | | | | |
| | | 618-625, 627-634, 654-660, 664-670, | | | | |
| | | 682-688, 697-702, 729-735, 783-793, | | | | |
| | | 804-812, 817-829, 862-868, 908-920, | | | | |
| | | 954-960, 1000-1006, 1008-1031, 1044-1050, | | | | |
| | | 1069-1077, 1079-1084, 1097-1118, | | | | |
| | | 1139-1146, 1152-1158, 1165-1176, | | | | |
| | | 1181-1186, 1201-1213, 1261-1267, | | | | |
| | | 1272-1280, 1282-1289, 1358-1364, | | | | |
| | | 1373-1382, 1390-1400, 1443-1450, | | | | |
| | | 1497-1505, 1530-1552, 1560-1568 | | | | |
| ECs3597 | L-isoaspartate protein | 4-13, 20-34, 47-53, 58-65, 76-82, 89-106, | L: 2 | 10-41 | 97 | 397 |
| | carboxylmethyltransferase | 139-160, 165-182, 191-205 | | | | |
| ECs3736 | hypothetical protein | 31-42, 59-75, 91-102, 104-123, 147-153, | G: 6 | 4-34 | 98 | 398 |
| | | 172-184, 193-206, 257-266, 306-316, | | | | |
| | | 318-329 | | | | |
| ECs3745 | putative deacetylase | 5-14, 26-35, 38-45, 54-60, 63-79, 121-127, | L: 2, P: 2 | 64-148 | 99 | 399 |
| | | 137-145, 152-162, 167-173, 175-183, | | | | |
| | | 191-202, 218-228, 238-263, 278-295, | | | | |
| | | 303-316, 320-335, 337-345, 359-365, | | | | |
| | | 382-400 | | | | |
| ECs3811 | hypothetical protein | 4-17, 31-39, 46-61, 68-73, 76-97, 128-139, | C: 2 | 187-223 | 100 | 400 |
| | | 150-156, 166-172, 174-182, 184-215, | | | | |
| | | 219-225, 238-245, 249-262 | | | | |
| ECs3821 | DNA-specific | 4-23, 30-41, 44-53, 58-70, 82-91, 107-114, | G: 2 | 1-69 | 101 | 401 |
| | endonuclease I | 122-129, 148-155, 201-207, 223-232 | | | | |
| ECs3824 | hypothetical protein | 4-16, 28-41, 44-52, 60-66, 73-82, 92-101, | A: 3 | 89-130 | 102 | 402 |
| | | 108-114, 133-138, 145-155, 177-185, | | | | |
| | | 194-202 | | | | |
| ECs3827 | putative protein transport | 4-9, 21-39, 72-78, 82-88, 99-131, 136-143, | E: 2, G: 2, P: 3 | 209-237 | 103 | 403 |
| | | 151-162, 164-187, 189-204, 208-216, | | | | |
| | | 223-229, 232-240, 246-256, 269-283, | | | | |
| | | 288-299, 311-321, 328-335 | | | | |
| ECs3832 | putative alpha helix chain | 4-14, 36-48, 66-73, 75-89, 95-103, 115-123, | F: 1 | 178-262 | 104 | 404 |
| | | 128-133, 140-145, 151-158, 165-176, | | | | |
| | | 178-188, 224-254, 267-278, 289-297, | | | | |
| | | 302-311 | | | | |
| ECs3836 | hypothetical protein | 19-25, 55-70, 76-82, 88-107, 114-129, | P: 20, L: 3 | 1-35 | 105 | 405 |
| | | 136-145, 154-177, 205-219, 227-233 | | | | |
| ECs3843 | integrase | 26-33, 39-45, 50-62, 76-85, 87-101, | C: 4, H: 5, P: 3 | 254-315, 323-407 | 106 | 406 |
| | | 116-131, 142-152, 154-186, 193-199, | | | | |
| | | 201-217, 221-243, 266-272, 281-298, | | | | |
| | | 324-330, 335-342, 345-355, 375-383, | | | | |
| | | 407-413 | | | | |
| ECs3923 | outer membrane channel | 4-22, 27-36, 60-69, 90-98, 107-113, | C: 5 | 358-400 | 107 | 407 |
| | TolC | 117-123, 127-134, 137-151, 154-161, | | | | |
| | | 169-178, 185-192, 202-208, 214-223, | | | | |
| | | 230-239, 245-255, 266-275, 307-317, | | | | |
| | | 323-337, 339-353, 361-379, 385-391, | | | | |
| | | 393-401, 415-422, 424-429, 434-442, | | | | |
| | | 444-449, 470-480 | | | | |
| ECs3937 | hypothetical protein | 4-25, 31-42, 83-101, 109-123, 127-136, | N: 5 | 223-239 | 108 | 408 |
| | | 139-145, 154-166, 169-182, 194-201, | | | | |
| | | 210-220, 226-237, 251-275, 277-304, | | | | |
| | | 309-329, 341-362, 367-372, 377-393, | | | | |
| | | 400-406 | | | | |
| ECs3951 | hypothetical protein | 4-22, 29-34, 37-44, 48-78, 98-110, 127-142, | C: 2 | 59-127 | 109 | 409 |
| | | 144-156, 158-165 | | | | |
| ECs4037 | hypothetical protein | 4-12, 14-20, 27-34, 39-47, 51-67, 69-81, | L: 4 | 67-105 | 110 | 410 |
| | | 89-97, 105-119, 121-133, 140-149, 151-161 | | | | |
| ECs4041 | putative enzyme | 6-19, 25-35, 43-48, 56-69, 73-93, 137-146, | E: 3, N: 2 | 259-291 | 111 | 411 |
| | | 152-161, 164-207, 212-229, 236-241, | | | | |
| | | 244-250, 273-288, 292-299, 314-324 | | | | |
| ECs4049 | protein chain initiation | 17-24, 34-40, 78-85, 227-233, 294-315, | D: 3, M: 45, | 80-214 | 112 | 412 |
| | factor IF-2 | 327-335, 345-351, 354-359, 363-368, | Q: 7 | | | |
| | | 388-403, 405-411, 413-419, 425-434, | | | | |
| | | 462-472, 480-500, 528-536, 542-560, | | | | |
| | | 566-573, 579-589, 593-606, 614-646, | | | | |
| | | 651-658, 663-669, 686-726, 734-747, | | | | |
| | | 754-778, 787-806, 809-825, 827-839, | | | | |
| | | 876-887 | | | | |
| ECs4051 | hypothetical protein | 4-9, 15-29, 38-43, 50-81, 83-96, 98-108, | E: 3 | 133-148 | 113 | 413 |
| | | 116-122, 136-143 | | | | |
| ECs4061 | D-alanyl-D-alanine | 5-79, 98-105, 133-146, 158-182, 189-207, | N: 2 | 132-153 | 114 | 414 |
| | carboxypeptidase | 213-225, 231-252, 272-278, 283-303, | | | | |
| | | 312-317, 333-346, 361-367, 370-379, | | | | |
| | | 387-419, 421-433, 439-453, 460-468 | | | | |
| ECs4079 | hypothetical protein | 9-29, 35-40, 49-63, 69-76, 110-134, | C: 2 | 63-101 | 115 | 415 |
| | | 141-147, 160-169 | | | | |
| ECs4084 | hypothetical protein | 4-9, 13-20, 25-43, 50-56, 75-86, 102-115, | N: 3, H: 5 | 54-161, 256-285 | 116 | 416 |
| | | 120-126, 128-135, 139-145, 161-166, | | | | |
| | | 170-189, 202-210, 212-219, 221-232, | | | | |
| | | 240-248, 252-264 | | | | |
| ECs4091 | glutamate synthase large | 7-17, 19-33, 44-51, 56-70, 74-79, 85-93, | B: 2, L: 2 | 1018-1052, | 117 | 417 |
| | subunit | 96-102, 110-117, 124-132, 140-148, | | 1134-1262 | | |
| | | 157-176, 204-248, 256-269, 289-306, | | | | |
| | | 318-324, 331-339, 377-382, 389-397, | | | | |
| | | 399-411, 413-420, 424-432, 436-441, | | | | |
| | | 462-469, 499-506, 522-547, 549-563, | | | | |
| | | 569-575, 578-594, 609-614, 621-630, | | | | |
| | | 637-646, 652-685, 688-711, 713-724, | | | | |
| | | 739-744, 752-783, 793-799, 811-823, | | | | |
| | | 825-841, 846-855, 861-868, 874-886, | | | | |
| | | 895-907, 935-966, 977-1024, 1026-1035, | | | | |
| | | 1037-1055, 1063-1091, 1094-1103, | | | | |
| | | 1105-1119, 1128-1149, 1160-1173, | | | | |
| | | 1182-1194, 1210-1222, 1227-1234, | | | | |
| | | 1244-1258, 1275-1285, 1293-1300, | | | | |
| | | 1316-1322, 1336-1354, 1357-1364, | | | | |
| | | 1367-1372, 1386-1392, 1403-1411, | | | | |
| | | 1424-1430, 1439-1456, 1458-1469, | | | | |
| | | 1485-1504 | | | | |
| ECs4147 | dehydroshikimate | 4-30, 32-42, 59-65, 78-88, 104-127, | D: 2 | 6-90 | 118 | 418 |
| | reductase | 132-147, 158-171, 181-187, 195-214, | | | | |
| | | 220-226, 238-269 | | | | |
| ECs4174 | 50S ribosomal subunit | 10-16, 25-53, 64-74 | H: 6 | 1-83 | 119 | 419 |
| | protein L24 | | | | | |
| ECs4198 | FKBP-type peptidyl-prolyl | 4-29, 48-57, 75-86, 99-113, 146-155, | Q: 2 | 101-185 | 120 | 420 |
| | cis-trans isomerase | 164-174, 190-201, 215-234, 236-251 | | | | |
| ECs4216 | nitrite reductase | 4-9, 32-56, 58-67, 71-81, 90-95, 97-105, | N: 20 | 177-207 | 121 | 421 |
| | (NAD(P)H) subunit | 112-118, 124-132, 138-144, 147-167, | | | | |
| | | 170-177, 211-217, 231-241, 250-258, | | | | |
| | | 260-272, 274-282, 289-296, 299-309, | | | | |
| | | 319-331, 344-350, 356-362, 368-377, | | | | |
| | | 381-394, 399-406, 412-430, 432-450, | | | | |
| | | 459-473, 486-503, 508-515, 520-548, | | | | |
| | | 564-570, 581-587, 616-623, 628-635, | | | | |
| | | 638-660, 678-684, 691-696, 703-709, | | | | |
| | | 716-723, 760-772, 787-795, 835-844 | | | | |
| ECs4233 | putative transport protein | 5-43, 46-81, 88-95, 137-142, 163-191, | L: 3, M: 2, P: 5 | 58-179 | 122 | 422 |
| | | 195-203, 210-235, 241-254, 256-276, | | | | |
| | | 280-288, 292-305, 307-313, 317-333, | | | | |
| | | 335-343, 347-353, 357-363, 372-381, | | | | |
| | | 384-389, 399-409 | | | | |
| ECs4249 | hypothetical protein | 26-32, 38-44, 68-75, 85-100, 104-114, | A: 1, H: 3 | 542-627, 691-724 | 123 | 423 |
| | | 126-132, 140-150, 153-164, 175-193, | | | | |
| | | 200-209, 218-224, 226-232, 243-249, | | | | |
| | | 251-260, 275-293, 304-329, 335-353, | | | | |
| | | 364-479, 485-490, 500-512, 514-523, | | | | |
| | | 532-556, 577-589, 622-628, 631-653, | | | | |
| | | 656-678 | | | | |
| ECs4258 | 4-alpha- | 8-22, 25-30, 46-62, 67-73, 98-103, 105-114, | G: 5 | 170-207 | 124 | 424 |
| | glucanotransferase | 120-141, 144-153, 168-175, 181-193, | | | | |
| | | 198-204, 208-227, 235-242, 249-258, | | | | |
| | | 281-288, 291-306, 327-336, 340-361, | | | | |
| | | 368-380, 389-409, 417-426, 428-435, | | | | |
| | | 442-453, 468-486, 488-496, 498-509, | | | | |
| | | 511-523, 540-553, 566-579, 587-603, | | | | |
| | | 629-636, 677-682 | | | | |
| ECs4337 | hypothetical lipoprotein | 9-25, 41-61, 68-75, 81-102, 106-141, | A: 1 | 32-53 | 125 | 425 |
| | | 158-165, 173-191 | | | | |
| ECs4346 | ATP-binding protein of | 7-26, 28-37, 43-58, 67-79, 92-99, 103-111, | C: 2 | 95-122 | 126 | 426 |
| | nickel transport system | 118-128, 130-139, 152-165, 170-186, | | | | |
| | | 192-214, 216-223, 225-251 | | | | |
| ECs4347 | ATP-binding protein of | 4-16, 21-36, 38-47, 54-64, 92-103, 117-126, | L: 5, P: 2, Q: 2 | 70-163 | 127 | 427 |
| | nickel transport system | 134-155, 157-200, 202-223, 246-262 | | | | |
| ECs4410 | putative oxidoreductase | 30-38, 45-51, 75-90, 93-114, 119-127, | A: 6, H: 3 | 44-131, 484-615 | 128 | 428 |
| | subunit | 134-143, 151-159, 166-180, 189-207, | | | | |
| | | 217-222, 230-239, 267-276, 283-292, | | | | |
| | | 324-350, 374-386, 392-403, 409-416, | | | | |
| | | 418-424, 451-458, 466-477, 483-494, | | | | |
| | | 501-509, 521-528, 540-549, 556-561, | | | | |
| | | 573-579, 581-588, 621-626, 628-636, | | | | |
| | | 654-661, 695-701, 711-717, 734-743, | | | | |
| | | 751-757, 764-771, 789-798, 832-837, | | | | |
| | | 860-867, 869-883, 911-917, 942-950, | | | | |
| | | 958-964, 966-981, 992-999 | | | | |
| ECs4412 | hypothetical protein | 5-14, 27-42, 48-67, 71-83, 85-91, 105-112, | L: 2 | 541-569 | 129 | 429 |
| | | 114-135, 139-147, 159-165, 169-185, | | | | |
| | | 188-195, 199-208, 212-221, 231-253, | | | | |
| | | 264-272, 275-282, 290-303, 309-319, | | | | |
| | | 324-331, 340-358, 380-405, 419-425, | | | | |
| | | 438-444, 450-463, 468-477, 497-514, | | | | |
| | | 520-533, 549-556, 568-574, 617-626, | | | | |
| | | 637-643, 661-668, 674-684, 705-713, | | | | |
| | | 718-733, 735-775 | | | | |
| ECs4413 | putative cellulose | 13-19, 21-32, 45-69, 79-87, 90-109, | C: 3 | 104-137 | 130 | 430 |
| | synthase | 140-148, 156-208, 215-232, 243-274, | | | | |
| | | 276-284, 288-298, 301-316, 339-347, | | | | |
| | | 369-384, 405-412, 430-437, 445-457, | | | | |
| | | 464-470, 475-483, 490-509, 517-524, | | | | |
| | | 532-591, 609-628, 647-677, 681-709, | | | | |
| | | 731-740, 752-767, 770-781, 787-793, | | | | |
| | | 798-807, 825-836, 839-869 | | | | |
| ECs4480 | hypothetical protein | 4-10, 33-44, 73-78, 93-101, 123-129, | L: 2 | 1520-1553 | 131 | 431 |
| | | 135-165, 201-214, 251-261, 268-274, | | | | |
| | | 285-292, 316-322, 328-336, 342-350, | | | | |
| | | 353-360, 374-387, 391-399, 401-406, | | | | |
| | | 417-425, 437-443, 447-454, 511-522, | | | | |
| | | 530-535, 727-737, 762-774, 781-787, | | | | |
| | | 803-809, 827-838, 852-859, 877-883, | | | | |
| | | 901-907, 910-918, 951-956, 996-1002, | | | | |
| | | 1071-1079, 1086-1096, 1098-1104, | | | | |
| | | 1106-1119, 1129-1135, 1142-1148, | | | | |
| | | 1155-1161, 1167-1185, 1199-1205, | | | | |
| | | 1224-1232, 1242-1251, 1279-1287, | | | | |
| | | 1293-1299, 1305-1321, 1372-1396, | | | | |
| | | 1426-1435, 1467-1473, 1479-1492, | | | | |
| | | 1526-1533, 1548-1558, 1578-1585 | | | | |
| ECs4629 | hypothetical protein | 4-10, 36-45, 56-92, 108-114, 125-133, | C: 2, L: 19 | 95-189 | 132 | 432 |
| | | 137-146, 156-162, 164-186, 194-203, | | | | |
| | | 225-234, 242-251, 272-283, 285-306, | | | | |
| | | 310-315, 322-330, 358-371, 373-379, | | | | |
| | | 389-396 | | | | |
| ECs4674 | membrane-bound ATP | 4-32, 38-46, 66-83, 88-95, 110-118, | A: 1 | 51-81 | 133 | 433 |
| | synthase beta-subunit | 123-141, 169-180, 200-208, 217-225, | | | | |
| | AtpD | 237-245, 247-261, 263-272, 275-282, | | | | |
| | | 291-302, 310-338, 345-353, 360-369, | | | | |
| | | 371-378, 386-394, 398-413, 416-422, | | | | |
| | | 437-448 | | | | |
| ECs4691 | ATP-binding component | 4-10, 12-38, 59-64, 81-97, 122-132, | E: 2, N: 4 | 14-27 | 134 | 434 |
| | of D-ribose high-affinity | 136-142, 149-165, 180-187, 192-199, | | | | |
| | transporter | 205-216, 222-228, 244-251, 255-274, | | | | |
| | | 280-286, 294-320, 327-333, 339-346, | | | | |
| | | 353-359, 372-385, 402-408, 413-420, | | | | |
| | | 433-440, 443-453, 456-461, 464-472, | | | | |
| | | 483-495 | | | | |
| ECs4725 | putative cytochrome | 4-40, 42-56, 59-73, 76-110, 115-128, | E: 6 | 239-261 | 135 | 435 |
| | | 132-139, 148-170, 174-195, 197-207, | | | | |
| | | 214-220, 222-236, 238-246, 252-283, | | | | |
| | | 291-326, 334-413 | | | | |
| ECs4761 | uridine phosphorylase | 4-11, 18-26, 31-47, 59-68, 74-92, 98-144, | C: 5 | 18-66 | 136 | 436 |
| | | 149-158, 173-180, 200-210, 216-223, | | | | |
| | | 239-250 | | | | |
| ECs4762 | putative alpha helix chain | 4-30, 42-52, 59-67, 70-76, 80-86, 138-147, | E: 3 | 375-452 | 137 | 437 |
| | | 154-159, 206-217, 226-232, 240-248, | | | | |
| | | 250-257, 259-265, 280-294, 299-326, | | | | |
| | | 328-334, 340-355, 393-398, 415-422, | | | | |
| | | 440-447, 452-458 | | | | |
| ECs4784 | putative GTP-binding | 4-12, 20-31, 43-49, 100-118, 121-138, | N: 2 | 55-75 | 138 | 438 |
| | protein | 141-148, 153-161, 167-177, 206-213, | | | | |
| | | 225-231, 235-240, 256-267, 277-287, | | | | |
| | | 301-322, 325-333, 336-360, 381-388, | | | | |
| | | 400-415, 447-452, 459-472 | | | | |
| ECs4860 | essential cell division | 4-10, 29-56, 93-99, 119-124, 133-140, | M: 31 | 61-198 | 139 | 439 |
| | protein | 159-171, 187-195, 200-214, 221-232, | | | | |
| | | 249-255, 263-271, 285-291, 310-316 | | | | |
| ECs4901 | pantothenate kinase | 9-15, 48-65, 72-79, 87-102, 104-115, | H: 9 | 1-54 | 140 | 440 |
| | | 118-124, 126-138, 153-185, 188-207, | | | | |
| | | 212-239, 257-265, 297-304, 306-313 | | | | |
| ECs4910 | RNA polymerase beta | 18-38, 48-62, 68-107, 143-158, 167-181 | H: 4, M: 13 | 1056-1199 | 141 | 441 |
| | subunit | 193-198, 205-213, 220-231, 239-245, | | | | |
| | | 258-264, 279-300, 308-314, 318-328, | | | | |
| | | 343-354, 360-367, 425-433, 465-474, | | | | |
| | | 496-505, 508-514, 529-536, 545-562, | | | | |
| | | 572-580, 587-593, 595-609, 612-618, | | | | |
| | | 627-637, 642-649, 652-673, 688-693, | | | | |
| | | 696-701, 707-736, 748-754, 766-776, | | | | |
| | | 779-786, 791-797, 815-825, 830-842, | | | | |
| | | 857-865, 868-876, 880-887, 898-905, | | | | |
| | | 911-923, 925-936, 961-983, 1011-1018, | | | | |
| | | 1043-1059, 1073-1079, 1093-1104, | | | | |
| | | 1110-1116, 1135-1144, 1146-1163, | | | | |
| | | 1183-1189, 1196-1204, 1222-1242, | | | | |
| | | 1250-1262, 1275-1296, 1322-1330 | | | | |
| ECs4914 | thiamin biosynthesis | 15-27, 35-40, 47-55, 57-73, 77-93, 103-112, | C: 2 | 83-115 | 142 | 442 |
| | protein ThiG | 126-138, 141-179, 192-218, 224-237, | | | | |
| | | 244-257, 263-278 | | | | |
| ECs5012 | hypothetical protein | 4-22, 24-29, 36-43, 63-75, 90-96, 118-128, | D: 2, E: 2 | 70-79, 473-516 | 143 | 443 |
| | | 137-145, 168-182, 198-210, 212-221, | | | | |
| | | 242-250, 289-316, 318-323, 327-339, | | | | |
| | | 381-387, 401-411, 424-434, 443-449, | | | | |
| | | 453-465, 485-498, 500-508, 510-515, | | | | |
| | | 521-528, 538-545, 554-560, 574-606, | | | | |
| | | 619-627, 645-658, 681-688 | | | | |
| ECs5026 | regulator for SOS regulon | 8-18, 45-50, 52-62, 76-82, 84-107, 109-116 | L: 4, P: 14 | 9-73 | 144 | 444 |
| | | 130-137, 141-150, 152-158, 164-170, | | | | |
| | | 175-186, 188-196 | | | | |
| ECs5061 | selenopolypeptide subunit | 4-24, 39-46, 84-95, 133-151, 166-174, | C: 2, F: 4 | 40-166, 577-605 | 145 | 445 |
| | of formate dehydrogenase | 179-189, 196-203, 212-218, 223-236, | | | | |
| | | 240-246, 255-261, 266-275, 286-293, | | | | |
| | | 299-316, 323-331, 347-358, 368-380, | | | | |
| | | 382-389, 391-398, 410-417, 420-429, | | | | |
| | | 437-445, 451-456, 464-471, 504-514, | | | | |
| | | 523-532, 539-545, 553-567, 572-588, | | | | |
| | | 594-603, 620-630, 636-641, 656-663, | | | | |
| | | 665-672, 676-687, 693-700 | | | | |
| ECs5079 | ATP-binding component | 4-42, 48-59, 74-90, 92-119, 121-149, | L: 3 | 1-9 | 146 | 446 |
| | of phosphonate | 163-180, 185-192, 199-209 | | | | |
| | transporter | | | | | |
| ECs5087 | periplasmic binding | 5-26, 60-76, 104-114, 119-128, 136-141, | C: 8 | 294-334 | 147 | 447 |
| | protein component of Pn | 156-167, 186-198, 218-237, 260-267, | | | | |
| | transporter | 275-290, 328-335 | | | | |
| ECs5091 | putative vimentin | 4-10, 14-37, 40-47, 68-77, 87-95, 103-111, | O: 1 | 302-448 | 148 | 448 |
| | | 116-153, 170-237, 245-251, 253-274, | | | | |
| | | 280-299, 311-318, 321-338, 364-371, | | | | |
| | | 378-392, 395-430, 438-451, 458-475, | | | | |
| | | 479-507, 520-526, 542-560, 573-586, | | | | |
| | | 591-598, 608-614, 636-668, 678-690, | | | | |
| | | 692-698, 702-717, 724-731 | | | | |
| ECs5147 | delta(2)- | 5-17, 23-48, 60-73, 75-82, 98-108, 110-128, | G: 5, H: 2, N: 4 | 63-147 | 149 | 449 |
| | isopentenylpyrophosphate | 146-160, 168-180, 191-213, 229-237, | | | | |
| | tRNA-adenosine | 240-252, 269-277, 305-313 | | | | |
| | transferase | | | | | |
| ECs5153 | adenylosuccinate | 4-10, 19-35, 41-47, 51-60, 70-80, 91-115, | E: 3 | 356-391 | 150 | 450 |
| | synthetase | 170-191, 194-211, 226-232, 234-241, | | | | |
| | | 256-273, 289-294, 311-349, 358-363, | | | | |
| | | 392-400, 406-416 | | | | |
| ECs5191 | 2:3-cyclic-ucleotide 2- | 5-25, 50-57, 67-75, 78-86, 94-112, 122-145, | H: 6 | 7-127 | 151 | 451 |
| | phosphodiesterase | 152-165, 171-183, 193-199, 217-235, | | | | |
| | | 238-253, 255-264, 281-287, 294-303, | | | | |
| | | 309-314, 319-324, 327-341, 349-355, | | | | |
| | | 364-382, 384-392, 397-411, 419-427, | | | | |
| | | 435-452, 455-463, 488-504, 536-541, | | | | |
| | | 558-563, 568-574, 595-601, 614-620, | | | | |
| | | 637-644 | | | | |
| ECs5218 | repressor of treA, B, C | 10-16, 39-45, 62-91, 102-114, 120-127, | N: 2 | 224-295 | 152 | 452 |
| | | 136-147, 152-159, 163-173, 178-188, | | | | |
| | | 196-217, 223-231, 234-254, 257-267, | | | | |
| | | 270-283, 290-300, 306-312 | | | | |
| ECs5276 | export and assembly outer | 4-9, 12-21, 23-52, 54-65, 74-83, 103-117, | Q: 7 | 283-379 | 153 | 453 |
| | membrane protein | 131-141, 144-163, 171-177, 183-189, | | | | |
| | | 205-212, 252-262, 297-304, 308-314, | | | | |
| | | 320-329, 343-349, 357-370, 375-380, | | | | |
| | | 395-405, 434-441, 456-465, 474-484, | | | | |
| | | 505-514, 528-536, 540-549, 576-582, | | | | |
| | | 597-607, 616-622, 634-641, 648-654, | | | | |
| | | 690-713, 715-724, 743-751, 757-763, | | | | |
| | | 772-789, 791-802, 809-814, 828-837, | | | | |
| | | 840-846, 853-875 | | | | |
| ECs5315 | methyl-accepting | 4-27, 40-46, 55-62, 84-100, 108-114, | P: 4 | 252-272 | 154 | 454 |
| | chemotaxis protein | 118-123, 132-145, 165-171, 178-183, | | | | |
| | | 192-223, 226-232, 234-243, 276-282, | | | | |
| | | 299-305, 326-334, 340-351, 357-371, | | | | |
| | | 374-387, 395-406, 417-437, 443-452, | | | | |
| | | 470-478, 485-494, 496-503, 508-521, | | | | |
| | | 527-537, 541-546 | | | | |
| ECs5350 | soluble lytic murein | 4-36, 45-50, 58-63, 69-80, 89-97, 99-109, | P: 4 | 418-432 | 155 | 455 |
| | transglycosylase | 111-118, 126-132, 141-147, 172-184, | | | | |
| | | 188-197, 208-215, 220-231, 236-241, | | | | |
| | | 253-264, 271-280, 288-297, 342-347, | | | | |
| | | 361-367, 375-382, 388-394, 401-406, | | | | |
| | | 408-414, 441-447, 452-458, 466-476, | | | | |
| | | 483-491, 503-510, 521-528, 539-545, | | | | |
| | | 547-558, 566-576, 584-589, 606-617, | | | | |
| | | 624-636 | | | | |
| b1368 | putative alpha helix | 7-14, 5-32, 6-72, 95-100, 108-114, 123-135, | D: 4 | 149-248 | 156 | 456 |
| | protein | 143-153, 203-221, 224-230, 260-269, | | | | |
| | | 290-297, 302-308, 320-328, 333-339 | | | | |
| b2969 | putative general secretion | 21-27, 30-48, 55-65, 70-90, 97-107, | N: 4 | 240-257 | 157 | 457 |
| | pathway for protein | 122-128, 135-166, 172-180, 184-199, | | | | |
| | export | 205-224, 237-247, 252-269, 278-283 | | | | |
| b2986 | orf, hypothetical protein | 4-14, 20-33, 36-43, 49-60, 72-114, 117-123, | N: 2 | 58-89 | 158 | 458 |
| | | 125-132, 138-143, 157-175, 184-204, | | | | |
| | | 208-217 | | | | |
| b3480 | ATP-binding protein of | 4-15, 23-36, 38-47, 54-64, 92-103, 117-126, | L: 12 | 70-162 | 159 | 459 |
| | nickel transport system | 135-155, 157-200, 202-223, 231-239, | | | | |
| | | 246-261 | | | | |
| b3689 | orf, hypothetical protein | 4-10, 35-45, 56-92, 108-114, 127-146, | L: 26 | 93-188 | 160 | 460 |
| | | 160-186, 194-203, 225-234, 242-251, | | | | |
| | | 272-283, 285-306, 310-315, 322-330, | | | | |
| | | 358-371, 373-382, 389-396 | | | | |
| EAEC11 | 175 aa, hypothetical | 18-32, 35-82, 85-115, 119-142, 149-172 | N: 14 | 4-36 | 161 | 461 |
| | protein | | | | | |
| EAEC12 | Pic serin protease from | 6-14, 20-28, 35-55, 64-87, 100-109, | B: 3 | 414-503 | 162 | 462 |
| | Shigella flexneri 2a: | 144-149, 189-208, 210-218, 221-227, | | | | |
| | SF2973: 100% | 242-247, 254-264, 283-297, 301-308, | | | | |
| | | 310-322, 351-358, 372-378, 383-389, | | | | |
| | | 421-432, 447-460, 537-545, 550-558, | | | | |
| | | 581-593, 595-606, 645-658, 677-688 | | | | |
| EAEC15 | 75 aa, homology to part of | 9-34, 47-63 | N: 3 | 37-51 | 163 | 463 |
| | TraD (40 aa)[E. coli, strain | | | | | |
| | CR63], plasmid F | | | | | |
| EAEC16 | surface exclusion protein | 6-22, 50-58, 73-101, 119-128, 139-154, | F: 5 | 1-126 | 164 | 464 |
| | | 167-173, 209-217, 227-234 | | | | |
| EAEC17 | membrane protein traD - | 10-34, 37-44, 72-78, 87-100, 111-117, | F: 3 | 341-443 | 165 | 465 |
| | Escherichia coli | 122-143, 177-196, 207-229, 232-249, | | | | |
| | | 255-261, 268-278, 289-300, 315-349, | | | | |
| | | 351-358, 371-378, 386-394, 404-466, | | | | |
| | | 468-480 | | | | |
| EAEC18 | Sequence not present in | 16-22, 30-35, 45-52, 54-64, 74-84, 90-98, | D: 17 | 341-484 | 166 | 466 |
| | current EAEC genome, | 120-125, 135-148, 156-162, 166-186, | | | | |
| | but found in E. coli | 190-199, 201-215, 226-232, 262-270, | | | | |
| | plasmid pLG13. Conjugal | 281-289, 322-331, 335-340, 367-372, | | | | |
| | mobilization protein | 379-385, 415-426, 438-445, 455-466, | | | | |
| | MobA (plasmid transfer) | 472-479, 492-497 | | | | |
| | E. coli 75% | | | | | |
| EAEC19 | Sequence not present in | 4-31, 33-66, 77-83, 90-101, 118-135, | Q: 18 | 529-629 | 167 | 467 |
| | current EAEC genome. | 161-166, 168-189, 203-209, 216-222, | | | | |
| | Escherichia coil strain | 231-236, 269-277, 279-290, 298-310, | | | | |
| | H10407 plasmid pCS1 | 341-347, 371-376, 380-387, 389-395, | | | | |
| | secreted autotransporter | 410-419, 446-455, 465-471, 476-484, | | | | |
| | protein EatA (eatA) gene. | 513-522, 532-537, 545-556, 560-585, | | | | |
| | 100%. Homology to | 603-610, 630-657, 660-672, 694-704, | | | | |
| | (EAEC12) SepA Shigella | 717-728, 738-745, 754-766, 782-792, | | | | |
| | | 794-811, 813-819, 833-853, 901-906, | | | | |
| | | 912-917, 951-979, 985-991, 998-1004, | | | | |
| | | 1013-1019, 1052-1065, 1080-1086, | | | | |
| | | 1124-1130, 1142-1150, 1168-1176, | | | | |
| | | 1182-1193, 1209-1218, 1234-1245, | | | | |
| | | 1271-1277, 1284-1298, 1301-1308, | | | | |
| | | 1339-1345 | | | | |
| EAEC20 | Sequence not present in | 21-28, 57-71 | N: 10 | 15-46 | 168 | 468 |
| | current EAEC genome. | | | | | |
| | E. coli plasmid pCoID-157 | | | | | |
| | DNA 97%. 7.6 kd ORF | | | | | |
| EAEC21 | Hypothetical protein | 63-99, 101-109, 111-137, 143-172, 175-200 | G: 6 | 11-48 | 169 | 469 |
| EAEC23 | Hypothetical protein | 18-32, 35-82, 85-115, 119-142, 149-172 | G: 5 | 6-39 | 170 | 470 |
| EAEC24 | Hypothetical protein | 67-74, 88-94, 112-118, 127-138, 155-169, | H: 4 | 26-129 | 171 | 471 |
| | | 171-180, 183-190, 196-205, 243-249, | | | | |
| | | 260-271, 308-344, 346-373, 381-414, | | | | |
| | | 416-457, 473-513, 515-524, 528-535, | | | | |
| | | 539-544, 556-566, 572-580, 585-590 | | | | |
| EAEC25 | Hypothetical protein | 17-40, 47-66, 70-78 | H: 5 | 29-102 | 172 | 472 |
| EAEC27 | Hypothetical protein | 4-9, 23-41, 44-51, 58-64, 70-86, 94-111 | L: 6 | 47-77 | 173 | 473 |
| EAEC29 | Hypothetical protein | 4-22, 29-48, 50-58, 62-69, 71-78 | L: 7 | 6-35 | 174 | 474 |
| EAEC141 | Hypothetical ABC | 8-19, 31-47, 49-58, 64-79, 84-96 | L: 83 | 7-52 | 175 | 475 |
| | transporter | | | | | |
| EAEC147 | 139 aa, hypothetical | 4-17, 19-26, 41-49, 63-87, 92-99, 113-131 | D: 43 | 9-118 | 176 | 476 |
| | protein | | | | | |
| EAEC160 | dipeptide transport | 10-37, 55-68, 71-78, 92-98, 115-122, | A: 2 | 186-224 | 177 | 477 |
| | protein | 131-138, 149-158, 163-170, 172-189, | | | | |
| | | 212-219, 239-257, 259-271, 289-302, | | | | |
| | | 304-320, 322-340, 359-366, 373-384, | | | | |
| | | 400-412, 444-453, 460-474, 485-527 | | | | |
| ETLAB27 | No homology | 6-13 | E: 4 | Clone only | 178 | 478 |
| ETLAG82 | No homology | None | E: 6 | Clone only | 179 | 479 |
| ETLAD13 | No homology | 5-12 | E: 5 | Clone only | 180 | 480 |
| ETLAD81 | No homology | 6-14 | E: 3 | Clone only | 181 | 481 |
| ETLAP25 | No homology | None | P: 4 | Clone only | 182 | 482 |
| ETLAK26 | No homology | 4-10 | P: 3 | Clone only | 183 | 483 |
| ETLAT10 | No homology | None | P: 2 | Clone only | 184 | 484 |
| ETLAX86 | No homology | None | N: 6 | Clone only | 185 | 485 |
| ETLAY83 | No homology | 4-19 | N: 3 | Clone only | 186 | 486 |
| ETLBA51 | No homology | 9-14 | N: 2 | Clone only | 187 | 487 |
| ARF0254 | Hypothetical protein | 4-44, 47-60, 65-72, 92-98 | C: 2 | 61-95 | 188 | 488 |
| ARF0386 | Hypothetical protein | None | E: 5 | 2-17 | 189 | 489 |
| ARF0600 | Hypothetical protein | 19-29, 39-45, 52-59 | C: 10 | 7-32 | 190 | 490 |
| ARF0729 | Hypothetical protein | 6-20, 36-44 | N: 1 | 78-97 | 191 | 491 |
| ARF0842 | Hypothetical protein | 5-12 | N: 3 | 1-22 | 192 | 492 |
| ARF0965 | Hypothetical protein | 17-24, 26-41, 50-55 | C: 2 | 8-32 | 193 | 493 |
| ARF0968 | Hypothetical protein | 7-18 | E: 13 | 13-22 | 194 | 494 |
| ARF1004 | Hypothetical protein | 24-32 | C: 6 | 3-28 | 195 | 495 |
| ARF1396 | Hypothetical protein | 6-11, 14-35, 40-56 | C: 4 | 17-35 | 196 | 496 |
| ARF1480 | Hypothetical protein | 4-12, 17-23, 42-53, 69-81 | E: 10 | 45-64 | 197 | 497 |
| ARF1603 | Hypothetical protein | 4-25, 28-34, 37-43, 59-69, 104-114 | C: 2, G: 4, N: 5 | 52-117 | 198 | 498 |
| ARF1806 | Hypothetical protein | 4-12 | N: 2 | 4-22 | 199 | 499 |
| ARF2582 | Hypothetical protein | 4-9 | E: 5 | 1-19 | 200 | 500 |
| ARF2816 | Hypothetical protein | 4-22 | E: 37, P: 2 | 2-19 | 201 | 501 |
| ARF2885 | Hypothetical protein | 13-36, 48-63, 80-101, 141-149, 165-176, | A: 3 | 28-54 | 202 | 502 |
| | | 184-198 | | | | |
| ARF3066 | Hypothetical protein | 4-14, 21-26 | P: 6 | 21-29 | 203 | 503 |
| ARF3107 | Hypothetical protein | 4-26 | N: 2 | 20-36 | 204 | 504 |
| ARF3116 | Hypothetical protein | 4-13 | P: 2 | 7-22 | 205 | 505 |
| ARF3364 | Hypothetical protein | 7-13, 21-34 | D: 2 | 26-54 | 206 | 506 |
| ARF3558 | Hypothetical protein | 4-21, 25-44, 59-68 | B: 5 | 1-92 | 207 | 507 |
| ARF3629 | Hypothetical protein | 4-14, 26-33 | G: 3 | 12-33 | 208 | 508 |
| ARF3673 | Hypothetical protein | 12-31, 46-60, 87-94 | B: 3 | 1-98 | 209 | 509 |
| ARF3699 | Hypothetical protein | 5-14 | N: 3 | 4-22 | 210 | 510 |
| ARF3942 | Hypothetical protein | 6-15, 34-52 | E: 2 | 14-36 | 211 | 511 |
| ARF4105 | Hypothetical protein | 5-18, 27-33, 40-48 | C: 2 | 17-39 | 212 | 512 |
| ARF4206 | Hypothetical protein | 8-17, 63-70, 89-100 | A: 3, C: 12, | 21-52 | 213 | 513 |
| | | | L: 11 | | | |
| ARF4334 | Hypothetical protein | 4-18, 21-31, 51-68 | A: 5 | 34-66 | 214 | 514 |
| ARF4425 | Hypothetical protein | 4-9, 14-19 | L: 6 | 3-31 | 215 | 515 |
| ARF4467 | Hypothetical protein | 4-10, 21-30, 37-51 | L: 8 | 11-44 | 216 | 516 |
| ARF4491 | Hypothetical protein | 4-9, 32-38 | P: 5 | 7-22 | 217 | 517 |
| ARF4639 | Hypothetical protein | 4-22, 29-36, 38-47 | C: 4 | 12-43 | 218 | 518 |
| ARF4661 | Hypothetical protein | 4-12, 14-23 | N: 3 | 26-37 | 219 | 519 |
| ARF4692 | Hypothetical protein | 4-11, 20-46 | A: 1 | 32-59 | 220 | 520 |
| ARF4739 | Hypothetical protein | 4-10 | A: 6 | 1-30 | 221 | 521 |
| ARF4851 | Hypothetical protein | 4-28, 32-50 | A: 5 | 17-51 | 222 | 522 |
| ARF4921 | Hypothetical protein | 14-28 | N: 1 | 2-14 | 223 | 523 |
| ARF5002 | Hypothetical protein | 4-25 | A: 2 | 12-40 | 224 | 524 |
| ARF5020 | Hypothetical protein | 33-41, 43-53 | C: 2 | 16-39 | 225 | 525 |
| ARF5159 | Hypothetical protein | 9-16 | E: 1 | 7-18 | 226 | 526 |
| ARF5319 | Hypothetical protein | 4-11, 24-31 | E: 2 | 18-34 | 227 | 527 |
| ARF5347 | Hypothetical protein | 14-20, 48-56, 62-69, 81-87 | G: 23 | 4-56 | 228 | 528 |
| ARF-b1398 | Hypothetical protein | 8-16 | N: 2 | 13-39 | 229 | 529 |
| ARF-b3374 | Hypothetical protein | 11-16, 26-40, 50-63 | G: 2 | 6-48 | 230 | 530 |
| ARF-b3577 | Hypothetical protein | 23-34, 59-72 | G: 2 | 1-28 | 231 | 531 |
| ARFF11 | Hypothetical protein | 11-16, 26-82, 95-101, 103-113, 120-164, | A: 2 | 46-77 | 232 | 532 |
| (ARF4418) | | 179-185, 187-194, 224-248, 255-263, | | | | |
| | | 276-293, 296-301, 304-312, 314-320, | | | | |
| | | 351-374, 390-398, 401-407, 420-426, | | | | |
| | | 434-444, 454-475, 481-508, 521-531, | | | | |
| | | 535-549 | | | | |
| ARF20 | Hypothetical protein | 6-30, 32-53, 69-76, 78-86, 96-112, 121-135, | G: 3 | 6-30 | 233 | 533 |
| (ARF5062) | | 142-175, 177-199, 201-255, 263-269, | | | | |
| | | 277-288, 290-303, 307-345, 353-364, | | | | |
| | | 388-403, 443-455, 462-474, 480-485 | | | | |
| ARF21 | Hypothetical protein | 12-61 | A: 7 | 14-46 | 234 | 534 |
| ARF22 | Hypothetical protein | 4-12, 24-33, 39-51, 57-63, 78-87 | C: 3 | 26-51 | 235 | 535 |
| ARF23 | Hypothetical protein | 8-15, 29-40, 48-54 | C: 3 | 33-56 | 236 | 536 |
| ARF132 | Hypothetical protein | 22-31, 59-69 | C: 2 | 70-100 | 237 | 537 |
| (ARF4862) | | | | | | |
| ARF152 | Hypothetical protein | 12-61 | A: 6 | 12-43 | 238 | 538 |
| CRF0147 | Hypothetical protein | 4-16, 28-39, 62-71, 85-97 | L: 12 | 54-85 | 239 | 539 |
| CRF0173 | Hypothetical protein | 10-20, 23-31, 35-42, 48-62 | G: 4 | 30-53 | 240 | 540 |
| CRF0372 | Hypothetical protein | 9-41, 46-52, 70-85 | A: 5 | 63-89 | 241 | 541 |
| CRF0451 | Hypothetical protein | 18-34, 36-46, 71-83, 95-101, 130-143, | P: 7 | 96-115 | 242 | 542 |
| | | 149-161 | | | | |
| CRF0464 | Hypothetical protein | 4-18, 26-66, 68-95, 100-110, 120-135, | P: 5 | 160-176 | 243 | 543 |
| | | 143-165, 168-175, 177-198 | | | | |
| CRF0575 | Hypothetical protein | 4-16, 21-34, 51-56 | P: 2 | 10-29 | 244 | 544 |
| CRF0600 | Hypothetical protein | 4-23, 29-37, 40-70, 78-91, 98-111 | N: 3 | 89-115 | 245 | 545 |
| CRF1135 | Hypothetical protein | 4-34, 56-62 | P: 5 | 36-54 | 246 | 546 |
| CRF1408 | Hypothetical protein | 4-9 | G: 4 | 1-29 | 247 | 547 |
| CRF1476 | Hypothetical protein | 10-22, 24-37, 52-57, 74-81 | G: 5 | 16-69 | 248 | 548 |
| CRF1480 | Hypothetical protein | 4-16, 42-70, 78-93, 95-101, 103-111 | E: 2 | 64-88 | 249 | 549 |
| CRF1640 | Hypothetical protein | 4-9, 22-48, 51-59, 64-94, 100-124, 130-135 | N: 4 | 123-134 | 250 | 550 |
| CRF1683 | Hypothetical protein | 10-20, 27-40, 48-57 | C: 20, E: 75, | 15-58 | 251 | 551 |
| | | | G: 42 | | | |
| CRF1902 | Hypothetical protein | 24-37 | C: 1 | 12-30 | 252 | 552 |
| CRF2012 | Hypothetical protein | 30-42, 51-56, 67-76, 79-96 | C: 11 | 22-61 | 253 | 553 |
| CRF2015 | Hypothetical protein | 11-22, 28-35 | P: 9 | 18-33 | 254 | 554 |
| CRF2072 | Hypothetical protein | 4-9, 13-21, 37-42 | E: 14 | 23-36 | 255 | 555 |
| CRF2329 | Hypothetical protein | 4-12 | E: 4 | 12-22 | 256 | 556 |
| CRF2336 | Hypothetical protein | 39-50, 71-89, 95-106, 126-139, 154-162 | Q: 6 | 58-143 | 257 | 557 |
| CRF2570 | Hypothetical protein | 5-26, 38-46, 54-62, 69-81, 87-99, 103-117, | L: 16 | 136-167 | 258 | 558 |
| | | 120-136, 138-161, 168-189, 201-207 | | | | |
| CRF2633 | Hypothetical protein | 4-21, 33-39, 41-55, 61-68, 73-98, 104-110, | P: 2 | 97-115 | 259 | 559 |
| | | 121-127, 131-156 | | | | |
| CRF2645 | Hypothetical protein | 9-26, 36-48 | N: 10 | 21-40 | 260 | 560 |
| CRF2649 | Hypothetical protein | 4-12, 26-32 | E: 2 | 12-24 | 261 | 561 |
| CRF2696 | Hypothetical protein | 4-12, 17-23, 39-62 | A: 5 | 8-34 | 262 | 562 |
| CRF2937 | Hypothetical protein | 17-41, 47-66 | L: 19 | 12-30 | 263 | 563 |
| CRF3041 | Hypothetical protein | 4-11, 15-25, 33-52 | G: 6 | 1-27 | 264 | 564 |
| CRF3088 | Hypothetical protein | 4-11, 33-40, 48-76, 96-104 | E: 10 | 84-106 | 265 | 565 |
| CRF3100 | Hypothetical protein | 15-22 | E: 2 | 11-26 | 266 | 566 |
| CRF3160 | Hypothetical protein | 8-19, 44-53, 61-71, 78-85, 97-107 | C: 4 | 49-89 | 267 | 567 |
| CRF3314 | Hypothetical protein | 13-23, 31-44, 59-66, 84-90, 96-110 | B: 3 | 47-147 | 268 | 568 |
| CRF3625 | Hypothetical protein | 4-24, 56-73, 83-97, 112-132, 140-150, | G: 7 | 111-146 | 269 | 569 |
| | | 161-184 | | | | |
| CRF3797 | Hypothetical protein | 4-17, 19-26, 41-48, 63-87, 92-99, 113-131 | M: 11 | 10-136 | 270 | 570 |
| CRF3808 | Hypothetical protein | 4-11, 17-26 | C: 5 | 6-32 | 271 | 571 |
| CRF3936 | Hypothetical protein | 26-38, 48-55, 72-86, 90-107, 123-132, | N: 6 | 3-19 | 272 | 572 |
| | | 134-161, 181-187 | | | | |
| CRF4119 | Hypothetical protein | 4-19, 26-35 | C: 32 | 11-46 | 273 | 573 |
| CRF4266 | Hypothetical protein | 5-10, 21-38, 42-70, 84-103 | C: 6 | 92-127 | 274 | 574 |
| CRF4317 | Hypothetical protein | 6-17, 34-40, 42-51, 75-85, 94-100 | P: 5 | 38-63 | 275 | 575 |
| CRF4320 | Hypothetical protein | 6-13, 21-27, 29-35, 57-64 | C: 6 | 32-63 | 276 | 576 |
| CRF4336 | Hypothetical protein | 4-19, 22-48, 54-62, 73-91, 94-109 | P: 3 | 75-98 | 277 | 577 |
| CRF4344 | Hypothetical protein | 9-25 | N: 3 | 12-28 | 278 | 578 |
| CRF4364 | Hypothetical protein | 16-21 | P: 12 | 8-25 | 279 | 579 |
| CRF4393 | Hypothetical protein | 4-24, 26-32, 45-55, 58-67, 76-93, 104-111, | Q: 3 | 33-119 | 280 | 580 |
| | | 117-122, 128-136 | | | | |
| CRF4397 | Hypothetical protein | 5-11, 31-37, 56-63, 66-84 | P: 5 | 32-58 | 281 | 581 |
| CRF4483 | Hypothetical protein | 6-69, 75-87, 89-111, 149-156 | H: 4 | 52-139 | 282 | 582 |
| CRF4752 | Hypothetical protein | 4-13, 19-29, 49-68 | G: 12 | 24-49 | 283 | 583 |
| CRF4786 | Hypothetical protein | 19-25, 27-33, 43-84, 86-92, 111-118, | C: 6 | 95-124 | 284 | 584 |
| | | 125-136, 138-147 | | | | |
| CRF4885 | Hypothetical protein | 20-29, 50-56, 63-85, 89-98, 110-128 | G: 14 | 2-29 | 285 | 585 |
| CRF5063 | Hypothetical protein | 4-11, 41-47, 62-71 | G: 3 | 7-34 | 286 | 586 |
| CRF5138 | Hypothetical protein | 23-30, 48-57, 67-72, 81-89 | N: 5 | 11-31 | 287 | 587 |
| CRF5282 | Hypothetical protein | 14-27, 50-62 | A: 4 | 22-57 | 288 | 588 |
| CRF-b0497 | Hypothetical protein | 4-17, 23-37 | P: 10 | 13-33 | 289 | 589 |
| CRF-b1399 | Hypothetical protein | 5-33, 38-57, 60-68 | N: 10 | 18-37 | 290 | 590 |
| CRF-b2972 | Hypothetical protein | 4-19, 44-51 | G: 5 | 24-45 | 291 | 591 |
| CRF-b4332 | Hypothetical protein | 17-40, 47-66, 70-78 | G: 3 | 67-101 | 292 | 592 |
| CRF13 | Hypothetical protein | 4-20, 24-29, 43-55, 57-63, 74-83, 137-157, | H: 8 | 61-120 | 293 | 593 |
| | | 171-179, 181-192, 237-243, 273-279, | | | | |
| | | 300-310, 312-321, 324-330, 366-380, | | | | |
| | | 401-417 | | | | |
| CRF28 | Hypothetical protein | 6-21 | P: 30 | 17-43 | 294 | 594 |
| CRF29 | Hypothetical protein | 11-17 | N: 1 | 9-31 | 295 | 595 |
| CRF30 | Hypothetical protein | 18-28, 38-44, 53-59, 64-74, 78-85 | B: 3 | 10-96 | 296 | 596 |
| CRF31 | Hypothetical protein | 12-40, 49-58 | C: 23 | 5-49 | 297 | 597 |
| CRF32 | Hypothetical protein | 28-34, 46-52, 54-68, 72-85, 95-104 | C: 3 | 66-94 | 298 | 598 |
| CRF33 | Hypothetical protein | 4-14 | C: 3 | 1-25 | 299 | 599 |
| CRF34 | Hypothetical protein | 4-18, 30-37, 51-65, 83-89, 99-105, 108-136 | D: 3 | 24-98 | 300 | 600 |

[0335] TABLE 2
Immunogenic proteins identified from S. flexneri 2a by bacterial surface display.

| | | | No. of | Location | | |
|---|---|---|---|---|---|---|
| | | | selected | of | | |
| | | | clones | identified | | Seq. |
| S. flexneri | Putative | | per ORF | immunogenic | Seq. | ID |
| antigenic | function | | and | region | ID | (Pro- |
| protein | (by homology) | predicted immunogenic aa* | screen | (aa) | (DNA) | tein) |
| icsB | intercellular | 26-34, 36-44, 68-78, 85-92, 96-101, 127-134, 141-148, | D: 4 | 147-240 | 925 | 997 |
| | spread protein | 156-166, 186-192, 244-256, 281-287, 291-301, 308-316, | | | | |
| | | 321-343, 368-382, 385-391, 394-404, 414-429, | | | | |
| | | 453-465, 471-489 | | | | |
| ipaA | Invasion | 10-18, 26-48, 58-68, 72-78, 94-105, 115-130, 155-164, | A: 5, | 1-123, 161-546 | 926 | 998 |
| | plasmid | 170-177, 179-185, 201-219, 243-260, 267-277, 295-302, | B: 74, | | | |
| | antigen A | 350-376, 398-403, 429-437, 451-462, 471-478, | C: 8, D: 81 | | | |
| | | 504-512, 563-568, 570-583, 589-594, 614-629 | | | | |
| ipaB | Invasion | 10-20, 35-45, 59-93, 163-168, 190-196, 200-210, 233-261, | B: 22, | 100-301, | 927 | 999 |
| | plasmid | 270-279, 306-329, 331-353, 363-381, 388-394, | D: 17 | 446-518 | | |
| | antigen B | 399-425, 443-460, 462-474, 477-498, 506-516, 522-542, | | | | |
| | | 546-559, 570-577 | | | | |
| ipaC | Invasion | 4-13, 28-34, 52-71, 78-90, 118-140, 147-156, 167-187, | B: 155, | 31-117, | 928 | 1000 |
| | plasmid | 264-275, 286-292, 305-310, 328-334, 340-346, 351-362 | C: 6, | 165-354 | | |
| | antigen C | | D: 129 | | | |
| ipaD | Invasion | 38-45, 76-84, 91-103, 111-118, 147-162, 166-177, 187-201, | B: 3, D: 18 | 18-100, | 929 | 1001 |
| | plasmid | 208-215, 242-249, 267-274, 295-301, 309-322 | | 111-296 | | |
| | antigen D | | | | | |
| ipaH14 | invasion | 4-9, 25-39, 41-47, 70-78, 82-103, 206-140, 152-188, | A: 6, | 199-383, | 930 | 1002 |
| | plasmid | 192-198, 200-207, 211-217, 232-251, 271-277, 285-299, | B: 13, | 454-579 | | |
| | antigen H14 | 307-314, 323-335, 344-370, 376-382, 388-398, | C: 30, D: 9 | | | |
| | | 417-422, 428-446, 448-456, 462-468, 494-504, 526-533, | | | | |
| | | 565-573 | | | | |
| ipaH45 | invasion | 10-27, 50-87, 94-109, 115-128, 134-152, 155-169, 175-193, | B: 4, C: 1, | 206-363 | 931 | 1003 |
| | plasmid | 196-213, 216-233, 235-251, 259-270, 272-283, | D: 1 | | | |
| | antigen H45 | 293-303, 311-318, 327-339, 348-374, 380-386, 392-402, | | | | |
| | | 421-426, 432-450, 452-460, 466-472, 498-508, | | | | |
| | | 530-537 | | | | |
| ipaH78 | invasion | 9-16, 25-31, 48-86, 90-101, 109-127, 131-147, 150-187, | A: 3, B: 3, | 1-118, 208-283, | 932 | 1004 |
| | plasmid | 189-195, 204-211, 213-226, 237-248, 250-261, | D: 9 | 494-564 | | |
| | antigen H78 | 271-281, 289-296, 305-317, 326-352, 358-364, 370-380, | | | | |
| | | 399-404, 410-428, 430-438, 444-450, 476-486, | | | | |
| | | 508-515, 547-555 | | | | |
| ipaH98 | invasion | 31-37, 57-66, 73-97, 99-117, 119-137, 141-149, 157-172, | A: 7, | 1-98, 233-351, | 933 | 1005 |
| | plasmid | 179-185, 190-196, 203-212, 216-224, 226-238, | B: 16, | 423-538 | | |
| | antigen H98 | 240-251, 261-271, 279-286, 295-307, 316-342, 348-354, | C: 10, | | | |
| | | 360-370, 389-394, 400-418, 420-428, 434-440, | D: 11 | | | |
| | | 466-476, 498-505, 537-545 | | | | |
| mxiH | Type III | 27-37, 44-58, 66-80 | D: 5 | 5-70 | 934 | 1006 |
| | secretion | | | | | |
| | protein | | | | | |
| sepA | secreted | 4-32, 35-69, 92-98, 113-137, 168-190, 224-235, 269-277, | B: 5, D: 10 | 22-86, 138-260, | 935 | 1007 |
| | protease | 279-289, 322-329, 370-376, 380-387, 389-395, | | 490-641 | | |
| | | 411-420, 442-457, 463-473, 476-487, 510-521, 531-554, | | | | |
| | | 561-567, 570-585, 604-610, 612-624, 632-651, | | | | |
| | | 660-672, 690-702, 718-730, 738-745, 782-809, 813-820, | | | | |
| | | 823-829, 844-854, 901-906, 911-917, 959-967, | | | | |
| | | 985-991, 997-1006, 1010-1019, 1036-1045, 1053-1059, | | | | |
| | | 1079-1086, 1124-1132, 1137-1150, 1168-1180, 1182-1193, | | | | |
| | | 1209-1214, 1216-1226, 1231-1245, 1271-1277, | | | | |
| | | 1290-1298, 1301-1307, 1339-1345 | | | | |
| SF0022 | isoleucine | 37-43, 50-57, 65-82, 86-109, 123-129, 141-150, 152-157, | C: 2 | 214-233 | 936 | 1008 |
| | tRNA | 166-172, 179-203, 209-241, 249-296, 298-307, | | | | |
| | synthetase | 312-326, 329-335, 341-348, 364-377, 379-399, 401-409, | | | | |
| | | 411-417, 420-425, 438-444, 461-466, 473-480, | | | | |
| | | 497-505, 522-534, 541-550, 586-597, 608-614, 622-632, | | | | |
| | | 660-666, 679-694, 697-706, 708-731, 737-772, | | | | |
| | | 784-789, 810-825, 837-873, 882-895, 901-928 | | | | |
| SF0132 | orf, partial | 10-16, 18-27, 41-61, 81-90, 133-142 | D: 1 | 43-118 | 937 | 1009 |
| | conserved | | | | | |
| | hypothetical | | | | | |
| | protein | | | | | |
| SF0144 | hydroxamate- | 21-47, 50-69, 83-89, 113-120, 129-146, 152-158, 160-189, | A: 2 | 107-140 | 938 | 1010 |
| | dependent iron | 204-225, 235-249, 251-263, 265-275 | | | | |
| | uptake, | | | | | |
| | cytoplasmic | | | | | |
| | membrane | | | | | |
| SF0267 | Rhs-family | 7-12, 16-24, 28-46, 61-68, 79-85, 87-93, 95-102, 108-123, | C: 13 | 584-613 | 939 | 1011 |
| | protein | 148-164, 166-172, 177-202, 205-215, 231-246, | | | | |
| | | 254-261, 267-273, 280-294, 309-315, 322-329, 337-342, | | | | |
| | | 345-351, 386-394, 406-413, 449-455, 473-480, | | | | |
| | | 490-497, 501-508, 532-539, 576-583, 623-629, 657-665, | | | | |
| | | 681-708, 715-722, 751-757 | | | | |
| SF0722 | 65.4 KD antigen | 10-26, 52-88, 94-109, 115-172, 175-189, 196-210, 215-232, | A: 1, B: 1 | 258-365 | 940 | 1012 |
| | | 244-252, 260-270, 272-283, 293-303, 311-318, | | | | |
| | | 327-339, 348-374, 380-386, 392-402, 421-426, 432-450, | | | | |
| | | 452-460, 466-472, 498-508, 530-537, 569-577 | | | | |
| SF0744 | putative ATP- | 25-46, 59-65, 68-75, 83-90, 93-100, 107-115, 124-135, | A: 5 | 245-271 | 941 | 1013 |
| | binding | 151-177, 183-189, 194-206, 209-215, 219-224, 251-263, | | | | |
| | component of a | 267-276, 305-311, 318-327, 332-338, 350-356, | | | | |
| | transport | 380-396, 406-412, 414-423, 431-437, 453-461, 463-481, | | | | |
| | system | 483-491, 505-510, 513-523, 528-545, 568-575 | | | | |
| SF0765 | outer | 4-19, 21-29, 61-68, 87-95, 103-113, 145-154, 157-170 | A: 1 | 10-76 | 942 | 1014 |
| | membrane | | | | | |
| | protein X | | | | | |
| SF0817 | arginine 3rd | 4-18, 28-36, 41-65, 69-84, 96-103, 106-115, 118-124, | B: 3 | 1-63 | 943 | 1015 |
| | transport | 126-132, 148-156, 169-181, 187-194, 221-227 | | | | |
| | system | | | | | |
| | periplasmic | | | | | |
| | binding protein | | | | | |
| SF0986 | orf, conserved | 5-33, 67-78, 122-129, 141-150, 172-185, 201-209, 217-223, | A: 2 | 309-334 | 944 | 1016 |
| | hypothetical | 235-252, 303-316, 355-368, 383-389, 400-406, | | | | |
| | protein | 411-420, 426-437, 445-451, 459-467, 479-496, 512-517, | | | | |
| | | 523-530, 535-562, 577-584, 590-605, 610-632, | | | | |
| | | 644-654, 663-669, 680-686 | | | | |
| SF1202 | orf, conserved | 31-38, 73-84, 97-121, 124-135, 141-146, 156-170, 174-191, | B: 2 | 85-153 | 945 | 1017 |
| | hypothetical | 205-210 | | | | |
| | protein | | | | | |
| SF1383 | invasion | 24-30, 49-69, 71-111, 113-127, 133-145, 153-169, 172-203, | A: 2, B: 1, | 243-286 | 946 | 1018 |
| | plasmid | 220-236, 247-254, 256-267, 277-287, 295-302, | C: 1 | | | |
| | antigen | 311-323, 332-345, 348-358, 364-370, 376-386, 405-410, | | | | |
| | (ipaH14) | 416-434, 436-444, 450-456, 482-492, 514-521, | | | | |
| | | 548-561 | | | | |
| SF1462 | NADP-specific | 4-10, 22-31, 39-53, 85-94, 102-110, 130-137, 143-149, | C: 38 | 260-345 | 947 | 1019 |
| | glutamate | 154-161, 174-179, 184-190, 197-203, 206-212, 220-227, | | | | |
| | dehydrogenase | 240-248, 251-265, 267-286, 297-310, 338-357, | | | | |
| | | 365-370, 373-382 | | | | |
| SF1841 | putative | 9-48, 54-71, 84-92, 114-145, 160-188, 190-200, 216-236, | D: 12 | 1-94 | 948 | 1020 |
| | transport | 243-255, 261-268, 281-304, 315-322, 330-336, | | | | |
| | periplasmic | 342-351, 370-380, 383-393, 400-408, 412-420, 436-442, | | | | |
| | protein | 452-459, 473-480, 501-512, 518-525, 532-541 | | | | |
| SF1880 | IpaH9.8 | 50-59, 66-81, 90-126, 129-185, 187-205, 213-219, 228-240, | B: 10, D: 2 | 275-374 | 949 | 1021 |
| | | 254-266, 268-279, 289-299, 307-314, 323-335, | | | | |
| | | 344-370, 376-382, 388-398, 417-422, 428-446, 448-456, | | | | |
| | | 462-468, 494-504, 526-533, 565-573 | | | | |
| SF1889 | putative tail | 5-14, 61-74, 91-99, 110-116, 119-136, 138-149, 159-169, | B: 4, D: 3 | 443-534 | 950 | 1022 |
| | length tape | 188-194, 205-227, 236-244, 249-256, 294-305, | | | | |
| | measure | 321-342, 350-364, 373-378, 385-392, 404-420, 422-430, | | | | |
| | protein | 462-470, 491-500, 513-520, 583-591, 617-638, | | | | |
| | precursor | 652-663, 674-680, 684-698, 709-718, 745-753, 757-763, | | | | |
| | | 781-788, 835-841, 844-854, 861-869, 882-890, | | | | |
| | | 898-916, 934-940, 946-952, 979-990 | | | | |
| SF1966 | flagellin | 23-35, 71-77, 94-100, 134-140, 157-163, 188-212, 214-221, | D: 3 | 57-155, | 951 | 1023 |
| | | 262-272, 287-293, 323-331, 360-372, 374-380, | | 324-404 | | |
| | | 402-411, 421-429, 438-443, 462-473, 477-486, 523-528, | | | | |
| | | 530-547 | | | | |
| SF2290 | probable nitrate | 11-36, 43-59, 62-70, 78-90, 159-165, 176-188, 197-202, | C: 2 | 57-82, 445-461 | 952 | 1024 |
| | reductase | 206-213, 220-225, 234-251, 258-275, 286-293, | | | | |
| | | 300-311, 329-337, 352-361, 363-369, 383-396, 399-417, | | | | |
| | | 420-432, 451-466, 472-478, 504-526, 546-552, | | | | |
| | | 558-566, 576-583, 591-609, 621-628, 642-650, 657-663, | | | | |
| | | 676-681, 692-706, 713-724, 734-753, 763-778, | | | | |
| | | 787-807, 819-825 | | | | |
| SF2332 | putative | 14-26, 38-46, 50-57, 76-87, 89-104, 107-112, 123-134, | C: 2 | 133-157 | 953 | 1025 |
| | enzyme | 136-142, 148-162, 173-194, 200-206, 208-216, 226-233, | | | | |
| | | 243-256, 264-307, 338-343, 351-359, 366-376 | | | | |
| SF2423 | orf, conserved | 13-19, 30-37, 46-60, 75-82, 100-105, 109-115, 134-140, | D: 2 | 251-352 | 954 | 1026 |
| | hypothetical | 146-161, 186-192, 199-205, 207-215, 223-230, | | | | |
| | protein | 254-260, 281-289, 297-311, 344-352 | | | | |
| SF2610 | invasion | 5-16, 19-24, 43-54, 56-89, 104-122, 126-139, 144-157, | A: 1, B: 7, | 284-400, | 955 | 1027 |
| | plasmid | 165-202, 232-244, 252-265, 272-277, 281-287, 289-300, | C: 14, D: 5 | 486-600 | | |
| | antigen | 308-320, 344-355, 364-390, 396-402, 408-418, | | | | |
| | | 437-442, 448-466, 468-476, 482-488, 514-524, 546-553, | | | | |
| | | 585-593 | | | | |
| SF2797 | (p)ppGpp | 21-27, 29-46, 50-58, 60-70, 76-98, 100-110, 116-122, | C: 2 | 586-630 | 956 | 1028 |
| | synthetase I | 124-130, 145-166, 170-188, 199-209, 214-221, 229-236, | | | | |
| | (GTP | 244-259, 270-305, 308-314, 319-329, 348-355, | | | | |
| | pyrophosphokinase) | 376-383, 396-442, 446-456, 461-466, 479-485, 513-524, | | | | |
| | | 528-533, 539-546, 556-563, 574-585, 595-602, | | | | |
| | | 604-616, 618-625, 630-647, 649-656, 662-674, 680-686, | | | | |
| | | 689-700, 716-739 | | | | |
| SF2942 | putative | 4-19, 31-49, 82-88, 92-98, 111-141, 146-153, 161-172, | C: 2 | 223-248 | 957 | 1029 |
| | protein | 174-197, 199-214, 218-226, 233-239, 242-250, 256-266, | | | | |
| | transport | 279-293, 298-309, 321-331, 338-345 | | | | |
| | protein | | | | | |
| SF2953 | putative alpha | 24-41, 54-61, 63-77, 83-91, 100-111, 116-121, 128-133, | D: 6 | 144-277 | 958 | 1030 |
| | helix chain | 139-146, 153-164, 166-176, 212-242, 255-266, | | | | |
| | | 269-275, 277-285, 290-299 | | | | |
| SF2968 | exported serine | 4-29, 33-47, 93-109, 117-125, 152-168, 175-180, 213-219, | D: 2 | 549-657 | 959 | 1031 |
| | protease SigA | 224-234, 261-267, 270-284, 321-326, 328-342, | | | | |
| | | 359-365, 383-389, 401-407, 417-424, 471-478, 491-497, | | | | |
| | | 532-537, 545-555, 569-583, 646-652, 688-694, | | | | |
| | | 711-718, 735-745, 794-803, 813-823, 834-839, 851-857, | | | | |
| | | 860-867, 874-882, 895-900, 902-910, 917-923, | | | | |
| | | 933-940, 948-955, 960-966, 1001-1007, 1045-1053, | | | | |
| | | 1058-1066, 1087-1101, 1103-1114, 1130-1139, 1141-1149, | | | | |
| | | 1155-1166, 1192-1198, 1211-1219 | | | | |
| SF2972 | similar to a 523 | 13-48, 57-63, 73-81, 89-103, 107-114, 119-125, 130-140, | C: 1 | 10-23 | 960 | 1032 |
| | aa protein from | 146-167, 175-186, 202-210, 212-220, 233-239, | | | | |
| | Escherichia coli | 255-270, 272-286, 288-301 | | | | |
| SF3061 | suppressor of | 5-41, 48-56, 75-81, 86-93, 100-111, 126-134, 150-156, | C: 11 | 105-135 | 961 | 1033 |
| | ftsI | 168-188, 209-236, 250-257, 260-274, 291-305, 311-335, | | | | |
| | | 337-344, 373-379, 393-406, 423-450, 461-467 | | | | |
| SF3094 | adenylylating | 8-16, 37-88, 105-117, 141-169, 172-178, 189-197, 210-217, | C: 5 | 444-479 | 962 | 1034 |
| | enzyme for | 243-249, 253-260, 269-282, 293-299, 315-332, | | | | |
| | glutamine | 363-373, 378-401, 406-415, 417-423, 454-460, 465-471, | | | | |
| | synthetase | 503-510, 515-521, 538-576, 578-616, 619-625, | | | | |
| | | 636-643, 651-669, 671-686, 691-698, 719-726, 734-748, | | | | |
| | | 762-778, 782-795, 799-810, 821-845, 894-908, | | | | |
| | | 917-925, 937-943, 946-967, 969-975 | | | | |
| SF3482 | cell division | 31-45, 47-55, 68-82, 87-100, 103-108, 112-117, 134-140, | B: 2 | 1-84 | 963 | 1035 |
| | membrane | 157-163, 166-175, 178-185, 197-206, 213-219, | | | | |
| | protein | 234-244, 265-272, 280-289, 292-305, 312-317, 322-328, | | | | |
| | | 335-344, 349-356, 361-372, 376-383, 399-421, | | | | |
| | | 426-444, 455-475, 490-495 | | | | |
| SF3774 | orf, conserved | 4-10, 43-53, 64-100, 116-123, 135-141, 145-154, 164-194, | D: 2 | 70-188 | 964 | 1036 |
| | hypothetical | 202-211, 233-242, 250-259, 280-291, 293-314, | | | | |
| | protein | 318-323, 330-338, 366-379, 381-387, 397-404 | | | | |
| SF3909 | uridine | 4-13, 20-28, 33-49, 61-70, 76-94, 100-146, 151-163, | A: 7 | 12-53 | 965 | 1037 |
| | phosphorylase | 175-182, 202-212, 218-225, 241-252 | | | | |
| SF3939 | histidine | 12-46, 49-64, 81-97, 103-108, 119-140, 150-173, 179-193, | A: 16 | 26-49 | 966 | 1038 |
| | protein kinase | 196-213, 215-223, 225-235, 238-253, 259-264, | | | | |
| | sensor for GlnG | 267-274, 278-284, 292-305, 314-321, 340-346 | | | | |
| | regulator | | | | | |
| SF3969 | formate | 18-23, 28-50, 100-150, 157-186, 197-203, 219-231, | A: 3 | 10-45 | 967 | 1039 |
| | dehydrogenase- | 233-240, 257-280 | | | | |
| | O, iron-sulfur | | | | | |
| | subunit | | | | | |
| SF4060 | RNA | 10-16, 29-49, 59-73, 79-118, 154-169, 178-192, 204-209, | B: 2 | 1054-1156 | 968 | 1040 |
| | polymerase | 216-224, 231-242, 250-256, 269-275, 290-311, | | | | |
| | beta subunit | 319-325, 329-339, 354-365, 371-378, 436-444, 476-485, | | | | |
| | | 507-516, 519-525, 540-547, 556-573, 583-591, | | | | |
| | | 598-604, 606-620, 623-629, 638-648, 653-660, 663-684, | | | | |
| | | 699-704, 707-712, 718-747, 759-765, 777-787, | | | | |
| | | 790-797, 802-808, 826-836, 841-853, 868-876, 879-887, | | | | |
| | | 891-898, 909-916, 922-934, 936-947, 972-994, | | | | |
| | | 1022-1029, 1054-1070, 1084-1090, 1104-1115, 1121-1127, | | | | |
| | | 1146-1155, 1157-1174, 1194-1200, 1207-1215, | | | | |
| | | 1233-1253, 1261-1273, 1286-1307, 1333-1341 | | | | |
| SF4229 | aminopeptidase | 14-26, 28-37, 40-49, 58-78, 89-95, 107-118, 125-132, | C: 13, D: 2 | 113-187 | 969 | 1041 |
| | A-I | 135-142, 155-161, 175-185, 195-213, 215-225, 233-241, | | | | |
| | | 248-254, 263-271, 294-323, 334-340, 345-351, | | | | |
| | | 355-368, 371-394, 401-410, 419-424, 449-456, 463-469, | | | | |
| | | 483-496 | | | | |
| pCP0179 | putative | 10-35, 52-116, 133-143, 149-170, 176-184 | A: 7 | 94-134 | 970 | 1042 |
| | transposase | | | | | |
| pCP0254 | orf, conserved | 4-10, 13-19, 31-39, 57-72, 92-103, 109-122, 126-144, | A: 6, B: 2, | 36-62, 157-180, | 971 | 1043 |
| | hypothetical | 168-174, 179-192, 234-245, 257-262 | C: 28, D: 2 | 190-270 | | |
| | protein (IS | | | | | |
| | Element) | | | | | |
| pCP0262 | Hypothetical | 4-29, 36-52, 60-68, 70-90 | A: 161, | 5-73 | 972 | 1044 |
| | protein | | B: 8 | | | |
| virG | virulent protein | 5-12, 22-56, 58-63, 69-82, 140-146, 175-180, 204-212, | B: 114, | 1-335 | 973 | 1045 |
| | | 240-248, 276-283, 307-312, 324-329, 335-353, 372-385, | D: 95 | | | |
| | | 403-412, 436-443, 448-464, 468-474, 476-483, | | | | |
| | | 503-514, 566-573, 590-597, 601-611, 619-626, 630-639, | | | | |
| | | 647-655, 666-679, 689-697, 707-719, 721-728, | | | | |
| | | 761-769, 783-789, 797-803, 806-812, 845-853, 864-870, | | | | |
| | | 893-904, 917-923, 949-956, 967-985, 1005-1021, | | | | |
| | | 1027-1034, 1059-1065 | | | | |
| ARF0504 | Hypothetical | 4-16, 18-28, 48-55, 67-75, 81-87, 94-100, 108-124, | A: 2 | 110-136 | 974 | 1046 |
| | protein | 139-147, 150-156 | | | | |
| ARF1190 | Hypothetical | 4-22, 28-37, 39-46 | C: 4 | 28-38 | 975 | 1047 |
| | protein | | | | | |
| ARF1280 | Hypothetical | 4-10, 13-19, 27-34, 40-103, 106-113 | A: 2 | 79-100 | 976 | 1048 |
| | protein | | | | | |
| ARF1420 | Hypothetical | none | C: 7 | 11-23 | 977 | 1049 |
| | protein | | | | | |
| ARF3121 | Hypothetical | 4-10, 19-25, 45-51, 64-75, 79-89 | C: 4 | 73-96 | 978 | 1050 |
| | protein | | | | | |
| ARF3760 | Hypothetical | 4-22, 29-36, 38-47 | A: 4, C: 3 | 21-44 | 979 | 1051 |
| | protein | | | | | |
| ARF4075 | Hypothetical | 8-20, 39-44 | A: 4 | 26-42 | 980 | 1052 |
| | protein | | | | | |
| ARF4262 | Hypothetical | 8-19, 31-47, 49-58, 64-79, 84-96 | C: 8 | 16-50 | 981 | 1053 |
| | protein | | | | | |
| CRF0107 | Hypothetical | 20-26, 31-37 | C: 10 | 4-13 | 982 | 1054 |
| | protein | | | | | |
| CRF0109 | Hypothetical | 4-10, 16-32, 34-42, 60-66 | A: 4 | 7-25 | 983 | 1055 |
| | protein | | | | | |
| CRF0548 | Hypothetical | 4-9, 23-45 | A: 7 | 8-44 | 984 | 1056 |
| | protein | | | | | |
| CRF0598 | Hypothetical | 4-19, 34-40, 53-81, 103-117, 122-187 | A: 13 | 22-51 | 985 | 1057 |
| | protein | | | | | |
| CRF1557 | Hypothetical | 4-24 | A: 3 | 1-30 | 986 | 1058 |
| | protein | | | | | |
| CRF2403 | Hypothetical | none | A: 5 | 2-27 | 987 | 1059 |
| | protein | | | | | |
| CRF2748 | Hypothetical | 4-18 | A: 6 | 9-44 | 988 | 1060 |
| | protein | | | | | |
| CRF2911 | Hypothetical | 4-17, 19-26, 41-49, 63-87, 92-99, 113-131 | D: 16 | 6-105 | 989 | 1061 |
| | protein | | | | | |
| CRF3470 | Hypothetical | 6-12 | A: 4 | 9-32 | 990 | 1062 |
| | protein | | | | | |
| CRF3528 | Hypothetical | 4-44, 49-62 | A: 5 | 22-65 | 991 | 1063 |
| | protein | | | | | |
| CRF3798 | Hypothetical | 20-28, 34-40 | C: 18 | 1-14 | 992 | 1064 |
| | protein | | | | | |
| CRF3843 | Hypothetical | 4-29, 35-57 | A: 11 | 17-43 | 993 | 1065 |
| | protein | | | | | |
| CRF4047 | Hypothetical | 14-29 | A: 3 | 24-35 | 994 | 1066 |
| | protein | | | | | |
| CRF4125 | Hypothetical | 4-19, 31-47, 62-73, 76-83, 87-93, 99-106 | A: 5 | 10-38 | 995 | 1067 |
| | protein | | | | | |
| CRF4283 | Hypothetical | 4-10, 12-26 | A: 3 | 1-28 | 996 | 1068 |
| | protein | | | | | |

A, 50 bp library of S. flexneri 2a in lamB with IC13-IgG (855),
B, 300 bp library in fhuA with IC13-IgG (812),
C, 50 bp library in lamB with IC14-IgG (745),
D, 300 bp library in fhuA with IC14-IgG (773);
*prediction of antigenic sequences longer than 5 amino acids was performed with the program ANTIGENIC {Kolaskar, A. et al., 1990}.

[0336] TABLE 3
Immunogenic proteins identified from C. jejuni by bacterial surface display.

| | | | No. of | Location | | |
|---|---|---|---|---|---|---|
| | | | selected | of | | |
| C. jejuni | | | clones per | identified | Seq. | Seq. |
| antigenic | Putative function | | ORF and | immunogenic | ID | ID |
| protein | (by homology) | predicted immunogenic aa* | screen | region (aa) | (DNA) | (Protein) |
| Cj0005c | putative | 16-30, 38-45, 55-61, 69-75, 131-141, 159-165, | B: 2 | 148-226 | 1069 | 1203 |
| | molybdenum | 169-179, 182-191, 206-214, 230-245, 252-262, | | | | |
| | containing | 272-280, 299-305, 328-339, 362-370, 372-378, | | | | |
| | oxidoreductase | 388-393, 401-409 | | | | |
| Cj0007 | glutamate synthase | 13-18, 24-33, 36-49, 69-79, 93-101, 113-119, 129-136, | B: 3, D: 7 | 1-14; 1115-1214 | 1070 | 1204 |
| | (NADPH) large | 139-164, 167-175, 182-193, 195-217, 224-231, | | | | |
| | subunit | 282-293, 336-345, 351-358, 373-378, 382-387, | | | | |
| | | 407-415, 441-447, 451-459, 461-470, 479-485, | | | | |
| | | 499-526, 533-544, 559-569, 572-581, 583-592, | | | | |
| | | 598-609, 613-624, 632-649, 654-660, 666-694, | | | | |
| | | 700-706, 712-722, 738-752, 771-778, 800-816, | | | | |
| | | 824-839, 847-864, 879-885, 918-925, 927-946, | | | | |
| | | 957-967, 971-999, 1006-1014, 1018-1037, | | | | |
| | | 1046-1055, 1057-1071, 1090-1098, 1104-1113, | | | | |
| | | 1115-1128, 1181-1187, 1193-1202, 1205-1211, | | | | |
| | | 1223-1234, 1240-1248, 1259-1265, 1273-1281, | | | | |
| | | 1289-1301, 1336-1343, 1346-1352, 1356-1363, | | | | |
| | | 1365-1378, 1382-1391, 1401-1408, 1416-1423, | | | | |
| | | 1433-1443, 1450-1455, 1461-1467, 1475-1481, | | | | |
| | | 1486-1493 | | | | |
| Cj0029 | cytoplasmic L- | 6-11, 31-53, 69-84, 86-93, 102-108, 112-121, 135-145, | F: 5 | 199-267 | 1071 | 1205 |
| | asparaginase | 157-177, 185-202, 208-226, 232-241, 244-251, | | | | |
| | | 260-289, 306-316 | | | | |
| Cj0037c | putative | 4-25, 36-41, 44-49, 68-78, 83-89, 95-102, 113-124, | A: 3, B: 7 | 49-119 | 1072 | 1206 |
| | cytochrome c | 137-142, 163-175, 179-185, 209-218, 233-244, | | | | |
| | | 250-261, 279-288, 308-322, 330-336 | | | | |
| Cj0079c | cytolethal | 4-24, 42-50, 57-75, 101-107, 109-131, 153-161, | E: 2 | 197-220; | 1073 | 1207 |
| | distending toxin | 180-190, 214-223, 226-240, 248-265 | | 252-267 | | |
| Cj0093 | putative | 4-24, 56-62, 111-117, 125-130, 138-143, 153-167, | A: 2; F: 7 | 15-111 | 1074 | 1208 |
| | periplasmic | 169-175, 195-204, 207-217, 234-250, 284-298, | | | | |
| | protein | 303-308, 314-326, 351-356, 359-371 | | | | |
| Cj0113 | peptidoglycan | 4-31, 58-64, 74-80, 88-94, 116-127, 131-138, 141-149, | A: 8; F: 2 | 1-63; 105-163 | 1075 | 1209 |
| | associated | | | | | |
| | lipoprotein | | | | | |
| | (omp18) | | | | | |
| Cj0134 | homoserine kinase | 4-9, 15-26, 33-40, 57-68, 91-108, 112-124, 132-152, | E: 1 | 203-222 | 1076 | 1210 |
| | | 158-168, 186-213, 228-236, 253-269, 276-283 | | | | |
| Cj0143c | periplasmic solute | 4-18, 31-48, 50-61, 81-88, 103-110, 114-121, 143-152, | E: 2 | 138-153 | 1077 | 1211 |
| | binding protein for | 154-164, 176-194, 199-210, 217-225, 234-240, | | | | |
| | ABC transporter | 245-254, 264-279 | | | | |
| Cj0158c | putative haem- | 4-20, 35-41, 51-61, 76-88, 107-115, 122-128 | F: 5 | 13-108 | 1078 | 1212 |
| | binding | | | | | |
| | lipoprotein | | | | | |
| Cj0178 | putative outer | 4-18, 25-31, 41-46, 61-70, 79-85, 126-133, 135-141, | D: 6 | 157-219, | 1079 | 1213 |
| | membrane | 166-172, 175-181, 191-199, 208-217, 250-258, | | 432-508 | | |
| | siderophore | 261-273, 312-320, 370-376, 385-394, 401-409, | | | | |
| | receptor | 411-416, 431-445, 457-478, 531-543, 560-567, | | | | |
| | | 575-593, 607-615, 625-633, 679-689, 733-740, | | | | |
| | | 746-752 | | | | |
| Cj0181 | possible tonB | 4-28, 47-53, 58-64, 88-97, 124-129, 136-141, 146-167, | E: 4 | 64-92 | 1080 | 1214 |
| | transport protein | 174-184, 187-193, 195-203, 205-220, 231-237 | | | | |
| Cj0264c | molybdopterin- | 7-39, 44-56, 60-65, 83-99, 117-132, 142-148, 162-179, | E: 2, F: 5 | 55-76, 667-736 | 1081 | 1215 |
| | containing | 185-203, 213-231, 239-245, 248-259, 288-295, | | | | |
| | oxidoreductase | 330-335, 370-381, 391-396, 401-407, 443-462, | | | | |
| | | 472-492, 505-512, 521-530, 549-557, 562-577, | | | | |
| | | 647-653, 660-666, 673-680, 695-703, 710-717, | | | | |
| | | 729-734, 745-751, 756-766, 769-778, 787-794, | | | | |
| | | 812-819, 825-834 | | | | |
| Cj0281c | putative | 5-11, 21-27, 48-56, 64-73, 75-85, 110-117, 124-130, | B: 5 | 100-124 | 1082 | 1216 |
| | transaldolase | 132-138, 145-163, 165-171, 186-198, 231-239, | | | | |
| | | 246-254, 265-270, 289-296, 312-322 | | | | |
| Cj0285c | chemotaxis protein | 16-24, 26-63, 66-77, 91-97, 100-111, 148-169, | B: 1 | 252-296 | 1083 | 1217 |
| | | 182-188, 205-212, 223-230, 235-244, 264-272, | | | | |
| | | 291-297, 305-312 | | | | |
| Cj0297c | pantoate-beta- | 4-17, 19-31, 34-44, 47-59, 87-93, 99-105, 113-119, | D: 16 | 85-152 | 1084 | 1218 |
| | alanine ligase | 124-137, 139-146, 150-163, 165-175, 185-191, | | | | |
| | | 197-214, 222-227, 235-246, 257-270, 274-279 | | | | |
| Cj0396c | putative | 4-20, 40-52, 74-81, 110-117, 123-138, 144-150, | C: 7 | 33-55 | 1085 | 1219 |
| | lipoprotein | 163-181, 185-195, 199-232, 234-248, 269-277, | | | | |
| | | 280-286, 301-314, 324-329 | | | | |
| Cj0406c | putative | 4-19, 33-55, 67-74, 78-84, 91-105, 109-117, 132-138, | B: 1 | 151-162 | 1086 | 1220 |
| | lipoprotein | 167-176, 190-196, 202-207, 210-217 | | | | |
| Cj0415 | putative | 4-14, 20-26, 28-37, 77-84, 89-94, 114-123, 174-180, | E: 11 | 77-110 | 1087 | 1221 |
| | oxidoreductase | 200-208, 222-239, 241-251, 263-271, 276-282, | | | | |
| | subunit | 291-302, 330-335, 374-390, 392-400, 432-441, | | | | |
| | | 447-454, 462-467, 487-501, 516-526, 530-537, | | | | |
| | | 550-566 | | | | |
| Cj0432c | UDP-N- | 16-23, 25-31, 42-48, 57-75, 81-95, 108-118, 124-151, | B: 2 | 89-142 | 1088 | 1222 |
| | acetylmuramoylalanine- | 153-170, 178-185, 190-201, 216-222, 230-260, | | | | |
| | D-glutamate | 290-297, 300-307, 312-318, 326-334, 348-363, | | | | |
| | ligase | 365-385 | | | | |
| Cj0448c | putative MCP-type | 41-50, 52-70, 80-91, 123-131, 136-143, 146-158, | F: 4 | 59-203 | 1089 | 1223 |
| | signal transduction | 167-178, 207-213, 228-235, 242-264, 274-288, | | | | |
| | protein | 302-307, 335-347, 349-355 | | | | |
| Cj0505c | putative | 5-14, 21-31, 42-71, 76-103, 111-119, 123-132, | B: 2 | 335-347 | 1090 | 1224 |
| | aminotransferase | 138-144, 167-188, 194-200, 205-212, 230-246, | | | | |
| | (degT family) | 253-260, 263-269, 275-294, 300-319, 330-343, | | | | |
| | | 349-354 | | | | |
| Cj0543 | prolyl-tRNA | 6-14, 18-57, 67-81, 87-97, 104-109, 115-122, 125-139, | E: 9 | 410-444 | 1091 | 1225 |
| | synthetase | 147-156, 178-188, 193-199, 211-216, 221-235, | | | | |
| | | 265-287, 293-300, 312-323, 330-352, 369-379, | | | | |
| | | 385-390, 392-404, 408-420, 437-457, 471-483, | | | | |
| | | 489-494, 501-509, 525-535, 547-554 | | | | |
| Cj0548 | putative flagellar | 4-18, 55-82, 87-100, 105-117, 145-150, 168-175, | A: 15; | 99-226; | 1092 | 1226 |
| | hook-associated | 183-189, 198-203, 228-235, 247-256, 277-283, | B: 2; F: 12 | 566-643 | | |
| | protein | 293-301, 308-321, 337-362, 373-379, 392-397, | | | | |
| | | 427-434, 457-463, 502-510, 539-552, 560-566, | | | | |
| | | 615-629 | | | | |
| Cj0596 | major antigenic | 4-27, 59-75, 83-88, 95-105, 112-120, 128-144, | A: 3; F: 2 | 1-103; 124-232 | 1093 | 1227 |
| | peptide PEB3\cell | 164-169, 200-205, 220-226, 237-242, 253-259, | | | | |
| | binding factor 2 | 264-270 | | | | |
| Cj0599 | putative | 12-42, 69-77, 103-109, 120-128, 149-157, 161-166, | E: 3 | 138-216; | 1094 | 1228 |
| | periplasmic | 179-197, 201-218, 238-248, 253-261, 266-272, | | 272-287 | | |
| | protein | 278-286, 307-314 | | | | |
| Cj0613 | possible | 4-26, 28-43, 50-56, 62-67, 103-109, 121-130, 155-163, | A: 5 | 41-91; 179-200 | 1095 | 1229 |
| | periplasmic | 173-179, 197-202, 208-215, 221-233, 258-267, | | | | |
| | phosphate binding | 296-305, 308-314, 321-328 | | | | |
| | protein | | | | | |
| Cj0631c | putative | 4-15, 23-32, 48-55, 61-67, 86-98, 102-111, 124-130, | B: 4 | 475-513 | 1096 | 1230 |
| | ribonuclease | 137-157, 166-171, 178-186, 193-200, 218-232, | | | | |
| | | 236-241, 246-264, 274-288, 291-310, 338-346, | | | | |
| | | 348-359, 389-395, 402-414, 416-428, 430-443, | | | | |
| | | 445-451, 455-469, 473-484, 489-499, 501-509, | | | | |
| | | 511-525, 534-542, 556-561, 579-593, 601-621, | | | | |
| | | 625-637 | | | | |
| Cj0642 | putative DNA | 23-30, 33-50, 53-59, 106-114, 126-132, 140-146, | D: 13 | 88-176 | 1097 | 1231 |
| | repair protein | 171-180, 196-204, 224-240, 242-254, 262-272, | | | | |
| | | 274-282, 288-296, 326-332, 341-352, 378-387, | | | | |
| | | 394-407, 412-418, 431-464, 489-496 | | | | |
| Cj0652 | penicillin-binding | 4-35, 43-52, 60-79, 93-100, 120-139, 146-154, | F: 3 | 488-559 | 1098 | 1232 |
| | protein | 157-171, 208-226, 234-247, 265-271, 273-283, | | | | |
| | | 292-298, 309-323, 330-339, 355-382, 396-409, | | | | |
| | | 445-453, 455-465, 484-505, 512-525, 528-535, | | | | |
| | | 547-576, 584-594 | | | | |
| Cj0683 | putative | 5-28, 34-41, 47-54, 79-100, 112-117, 122-127, | F: 3 | 43-96 | 1099 | 1233 |
| | periplasmic | 130-139 | | | | |
| | protein | | | | | |
| Cj0687c | putative flagellar | 4-23, 25-38, 45-50, 68-77, 105-113, 149-156, 177-188, | F: 2 | 84-145 | 1100 | 1234 |
| | L-ring protein | 197-208, 222-229 | | | | |
| | precursor | | | | | |
| Cj0689 | acetate kinase | 11-16, 19-32, 37-43, 62-69, 72-80, 82-93, 97-128, | E: 3 | 6-26; 347-362 | 1101 | 1235 |
| | | 133-142, 156-166, 179-193, 199-205, 209-216, | | | | |
| | | 239-256, 269-278, 295-325, 332-349, 369-379 | | | | |
| Cj0690c | possible restriction/ | 4-10, 17-28, 39-48, 67-82, 93-100, 122-128, 144-153, | F: 2 | 934-1001 | 1102 | 1236 |
| | modification | 177-184, 196-208, 263-285, 289-295, 297-310, | | | | |
| | enzyme | 353-359, 367-377, 389-409, 413-421, 426-433, | | | | |
| | | 436-442, 445-451, 453-459, 468-475, 477-488, | | | | |
| | | 506-526, 544-554, 562-611, 639-650, 678-692, | | | | |
| | | 697-706, 718-724, 733-744, 746-754, 766-782, | | | | |
| | | 789-796, 808-822, 831-843, 847-856, 861-868, | | | | |
| | | 887-902, 931-937, 939-951, 957-964, 970-976, | | | | |
| | | 997-1003, 1017-1024, 1033-1039, 1048-1054, | | | | |
| | | 1060-1066, 1075-1083, 1092-1130, 1136-1152, | | | | |
| | | 1168-1176, 1210-1221, 1228-1238, 1242-1247 | | | | |
| Cj0692c | putative | 73-86, 88-95, 113-118, 166-178, 223-230, 243-280 | B: 1 | 202-216 | 1103 | 1237 |
| | membrane protein | | | | | |
| Cj0696 | cell division | 16-22, 40-46, 51-62, 77-83, 93-106, 116-124, 127-138, | F: 10 | 50-127 | 1104 | 1238 |
| | protein ftsZ | 151-158, 162-177, 185-207, 211-220, 223-234, | | | | |
| | | 261-269, 271-280, 309-317, 339-350 | | | | |
| Cj0699c | glutamine | 11-26, 36-42, 74-85, 88-101, 106-121, 137-156, | F: 4 | 95-163 | 1105 | 1239 |
| | synthetase | 186-198, 203-224, 226-254, 295-308, 311-318, | | | | |
| | | 327-355, 373-385, 417-443, 445-464 | | | | |
| Cj0704 | glycyl-tRNA | 5-11, 16-23, 34-43, 48-56, 71-83, 89-96, 101-110, | F: 3 | 19-90 | 1106 | 1240 |
| | synthetase alpha | 138-162, 164-180, 189-195, 204-214, 222-227, | | | | |
| | chain | 229-250, 255-261, 272-278 | | | | |
| Cj0709 | signal recognition | 13-19, 26-53, 67-73, 76-82, 87-102, 112-121, 123-148, | E: 3; F: 9 | 339-446 | 1107 | 1241 |
| | particle protein | 151-156, 162-170, 175-186, 199-209, 211-217, | | | | |
| | | 230-244, 251-287, 300-305, 368-374, 403-415, | | | | |
| | | 418-424 | | | | |
| Cj0718 | DNA polymerase | 4-19, 22-30, 59-73, 84-92, 97-117, 128-140, 165-173, | B: 6, F: 4 | 866-789 | 1108 | 1242 |
| | III, alpha chain | 224-234, 245-255, 276-284, 302-309, 323-330, | | | | |
| | | 349-355, 364-376, 380-385, 391-402, 404-415, | | | | |
| | | 424-432, 437-446, 449-477, 484-499, 516-526, | | | | |
| | | 537-544, 550-555, 562-568, 573-601, 616-623, | | | | |
| | | 653-663, 681-718, 720-728, 762-771, 779-799, | | | | |
| | | 801-806, 814-820, 827-835, 851-870, 899-906, | | | | |
| | | 950-957, 973-990, 995-1005, 1036-1052, | | | | |
| | | 1071-1077, 1086-1098, 1147-1152, 1167-1194 | | | | |
| Cj0720c | flagellin | 27-55, 57-64, 66-75, 135-142, 172-178, 191-197, | B: 6 | 184-217 | 1109 | 1243 |
| | | 229-235, 241-246 | | | | |
| Cj0723c | putative integral | 4-24, 33-39, 55-83, 91-114, 126-132, 137-159, | B: 1 | 113-128 | 1110 | 1244 |
| | membrane zinc- | 164-189, 202-224, 232-238, 241-253, 259-282, | | | | |
| | metalloprotease | 285-308, 310-335, 359-364, 371-388 | | | | |
| Cj0737 | putative | 6-28, 54-59, 103-114, 122-130, 145-153, 167-175, | D: 21 | 10-103 | 1111 | 1245 |
| | periplasmic | 184-190, 193-204, 207-212, 215-223, 282-289, | | | | |
| | protein | 291-300, 315-321, 327-339, 347-354 | | | | |
| Cj0753c | tonB transport | 14-37, 52-57, 73-85, 96-113, 124-136, 142-148, | F: 21 | 64-160 | 1112 | 1246 |
| | protein | 150-157, 166-172, 182-194, 199-215, 217-224 | | | | |
| Cj0755 | putative iron | 4-18, 20-33, 59-77, 93-100, 120-129, 131-137, | E: 4 | 406-431 | 1113 | 1247 |
| | uptake protein | 140-146, 148-158, 166-172, 185-191, 243-249, | | | | |
| | | 253-258, 295-307, 327-333, 345-370, 387-394, | | | | |
| | | 425-432, 483-489, 491-501, 521-527, 538-553, | | | | |
| | | 560-570, 576-582, 629-637, 649-658 | | | | |
| Cj0775c | valyI-tRNA | 9-17, 34-39, 41-59, 71-84, 86-98, 148-169, 177-187, | F: 3 | 664-745; | 1114 | 1248 |
| | synthetase | 194-203, 207-214, 222-228, 235-258, 265-273, | | 793-856 | | |
| | | 286-296, 300-307, 316-328, 338-361, 367-375, | | | | |
| | | 394-401, 407-418, 425-434, 480-495, 502-522, | | | | |
| | | 544-560, 568-575, 584-592, 600-622, 636-641, | | | | |
| | | 661-667, 669-690, 700-707, 719-731, 733-739, | | | | |
| | | 745-750, 767-776, 784-791, 795-811, 840-846, | | | | |
| | | 853-866 | | | | |
| Cj0802 | cysteinyI-tRNA | 19-54, 86-91, 98-105, 109-124, 126-136, 145-150, | E: 5 | 404-429 | 1115 | 1249 |
| | synthetase | 173-178, 196-204, 212-224, 229-239, 246-252, | | | | |
| | | 279-299, 307-313, 323-329, 337-345, 349-361, | | | | |
| | | 382-393, 399-406, 416-421 | | | | |
| Cj0814 | hypothetical | 20-26, 66-71, 84-97, 105-111, 122-137, 145-165, | F: 2 | 64-158 | 1116 | 1250 |
| | protein | 170-185, 204-210, 230-242 | | | | |
| Cj0832c | putative integral | 4-16, 28-69, 72-85, 87-99, 101-123, 128-136, 140-159, | B: 4 | 117-132 | 1117 | 1251 |
| | membrane protein | 161-173, 185-205, 207-220, 227-240, 242-252, | | | | |
| | | 274-280, 290-296, 301-326, 356-379, 399-453, | | | | |
| | | 461-473, 485-498, 501-525, 527-574 | | | | |
| Cj0849c | hypothetical | 4-11, 37-52, 56-64, 71-82, 89-96, 108-116, 122-137, | E: 1 | 536-549 | 1118 | 1252 |
| | protein | 144-162, 165-182, 184-194, 228-237, 252-267, | | | | |
| | | 289-296, 473-487, 489-503, 511-516, 527-545, | | | | |
| | | 553-570, 584-593, 604-611, 629-638, 640-649, | | | | |
| | | 684-696 | | | | |
| Cj0887c | putative flagellin | 21-37, 81-97, 119-127, 130-143, 158-163, 175-180, | A: 2, B: 5 | 168-235 | 1119 | 1253 |
| | | 219-230, 245-256, 265-273, 293-299, 319-327, | | | | |
| | | 425-434, 472-485, 493-498, 508-513, 552-557, | | | | |
| | | 562-570, 574-580, 588-594, 597-604, 631-636, | | | | |
| | | 640-646, 667-680, 699-718, 725-747 | | | | |
| Cj0942c | preprotein | 4-11, 19-29, 51-56, 65-73, 85-98, 109-121, 125-135, | B: 2 | 700-722 | 1120 | 1254 |
| | translocase SECA | 145-161, 171-177, 204-219, 223-228, 252-258, | | | | |
| | | 262-268, 286-313, 315-325, 327-332, 345-352, | | | | |
| | | 395-410, 429-435, 443-451, 455-463, 465-475, | | | | |
| | | 481-487, 516-522, 549-562, 585-591, 598-605, | | | | |
| | | 607-614, 643-651, 673-682, 690-696, 700-705, | | | | |
| | | 725-734, 738-744, 758-765, 769-779, 781-792, | | | | |
| | | 830-844, 847-853 | | | | |
| Cj0958c | putative | 10-40, 68-91, 95-104, 140-152, 158-170, 185-191, | F: 11 | 31-94 | 1121 | 1255 |
| | membrane protein | 196-201, 205-219, 240-246, 249-256, 262-268, | | | | |
| | | 274-280, 293-313, 315-320, 326-332, 338-358, | | | | |
| | | 402-453, 457-466, 476-516 | | | | |
| Cj1013c | putative | 10-34, 41-47, 50-66, 73-92, 100-107, 121-127, | D: 3 | 277-365 | 1122 | 1256 |
| | membrane protein | 133-139, 146-155, 159-175, 184-191, 223-230, | | | | |
| | | 238-247, 273-286, 300-310, 328-336, 352-358, | | | | |
| | | 365-372, 376-409, 415-423, 446-452, 459-465, | | | | |
| | | 471-484, 509-522, 532-540, 543-554, 586-598, | | | | |
| | | 600-610, 617-632, 670-689, 695-706, 711-727, | | | | |
| | | 741-746, 752-760, 772-835, 843-882, 890-933, | | | | |
| | | 958-973, 991-1022, 1024-1048, 1053-1070 | | | | |
| Cj1031 | putative outer | 4-31, 56-70, 77-96, 112-117, 124-137, 139-155, | B: 1 | 317-353 | 1123 | 1257 |
| | membrane | 160-169, 176-193, 228-234, 237-257, 271-288, | | | | |
| | component of | 317-322, 337-371, 373-391 | | | | |
| | efflux system | | | | | |
| Cj1032 | putative | 4-14, 20-28, 30-52, 54-62, 76-84, 94-100, 125-132, | B: 2 | 181-199 | 1124 | 1258 |
| | membrane fusion | 140-181, 185-191, 208-222 | | | | |
| | component of | | | | | |
| | efflux system | | | | | |
| Cj1033 | putative integral | 9-46, 53-59, 74-80, 82-93, 97-103, 111-117, 130-142, | F: 2 | 243-318 | 1125 | 1259 |
| | membrane | 152-161, 188-197, 236-251, 264-271, 285-295, | | | | |
| | component of | 307-340, 343-394, 397-412, 416-436, 440-472, | | | | |
| | efflux system | 497-527, 540-548, 561-566, 573-583, 591-598, | | | | |
| | | 607-616, 624-631, 639-649, 669-675, 683-689, | | | | |
| | | 694-718, 728-736, 756-771, 782-803, 814-829, | | | | |
| | | 831-871, 873-879, 882-897, 900-912, 920-928, | | | | |
| | | 940-953, 963-998 | | | | |
| Cj1048c | succinyl- | 5-16, 24-30, 34-39, 45-51, 59-72, 80-86, 100-108, | F: 5 | 226-320 | 1126 | 1260 |
| | diaminopimelate | 116-123, 133-140, 148-162, 176-181, 184-211, | | | | |
| | desuccinylase | 219-228, 233-242, 257-278, 300-310, 320-338, | | | | |
| | | 340-345, 352-360 | | | | |
| Cj1061c | isoleucyl-tRNA | 5-12, 51-58, 61-74, 95-112, 124-137, 153-158, | B: 4 | 38-55 | 1127 | 1261 |
| | synthetase | 163-189, 192-204, 209-236, 240-250, 255-273, | | | | |
| | | 304-317, 320-326, 334-348, 350-356, 360-378, | | | | |
| | | 384-416, 439-457, 465-470, 488-493, 496-505, | | | | |
| | | 531-541, 548-557, 579-587, 593-601, 616-647, | | | | |
| | | 649-659, 679-685, 693-702, 705-713, 715-734, | | | | |
| | | 737-743, 751-758, 763-779, 781-788, 791-801, | | | | |
| | | 856-862, 882-896, 903-914 | | | | |
| Cj1073c | ATP-dependent | 8-34, 51-57, 68-76, 79-95, 110-116, 127-140, 142-154, | E: 4, F: 4 | 418-441, | 1128 | 1262 |
| | protease La | 162-172, 174-202, 214-220, 228-239, 292-306, | | 511-591 | | |
| | | 314-320, 322-329, 337-344, 356-371, 374-380, | | | | |
| | | 382-393, 416-421, 424-433, 444-453, 461-468, | | | | |
| | | 470-478, 485-490, 497-503, 511-519, 537-543, | | | | |
| | | 555-564, 566-579, 588-594, 603-609, 615-627, | | | | |
| | | 634-640, 647-659, 663-689, 699-710, 728-735, | | | | |
| | | 739-748, 750-756, 764-769, 776-788 | | | | |
| Cj1076 | putative pyrroline- | 12-19, 21-30, 32-39, 43-49, 55-68, 76-87, 97-104, | B: 11 | 223-239 | 1129 | 1263 |
| | 5-carboxylate | 114-123, 130-141, 153-168, 179-205, 207-216, | | | | |
| | reductase | 218-226 | | | | |
| Cj1126c | putative integral | 8-34, 72-121, 128-141, 153-172, 174-216, 221-256, | B: 1 | 254-268 | 1130 | 1264 |
| | membrane protein | 261-294, 307-315, 332-349, 354-370, 372-435, | | | | |
| | | 452-457, 461-477, 487-492, 503-509, 511-520, | | | | |
| | | 537-549, 559-565, 568-582, 584-591, 593-602, | | | | |
| | | 607-617, 625-638, 655-674, 681-687, 696-703 | | | | |
| Cj1155c | putative cation- | 4-13, 23-40, 79-98, 106-124, 126-149, 154-161, | F: 10 | 522-597 | 1131 | 1265 |
| | transporting | 163-176, 178-187, 199-226, 232-254, 256-276, | | | | |
| | ATPase | 297-304, 308-326, 329-338, 364-373, 384-399, | | | | |
| | | 404-432, 439-499, 502-518, 523-544, 557-568, | | | | |
| | | 571-582, 584-590, 603-617, 621-627, 633-639, | | | | |
| | | 641-651, 653-663, 675-684, 686-699, 705-729, | | | | |
| | | 736-781 | | | | |
| Cj1184c | putative ubiquinol- | 5-45, 49-62, 85-99, 114-122, 136-148, 151-171, | A: 2 | 1-115 | 1132 | 1266 |
| | cytochrome C | 198-211, 253-260, 278-287, 297-303, 309-314, | | | | |
| | reductase | 318-324, 326-336, 348-363 | | | | |
| Cj1229 | putative curved- | 5-13, 22-33, 88-95, 132-144, 160-166, 189-202, | B: 5, E: 2 | 83-98, 244-269 | 1133 | 1267 |
| | DNA binding | 210-223, 253-258, 269-282, 286-294 | | | | |
| | protein | | | | | |
| Cj1233 | putative hydrolase | 18-25, 29-38, 72-95, 97-107, 110-139, 144-152, | B: 4 | 44-56 | 1134 | 1268 |
| | | 155-161, 174-182, 198-203 | | | | |
| Cj1236 | hypothetical | 5-14, 17-23, 29-50, 52-64, 72-98, 109-115, 120-135, | B: 5 | 10-34 | 1135 | 1269 |
| | protein | 137-145, 152-158, 167-175, 178-185, 210-234, | | | | |
| | | 241-255, 258-271, 276-281, 290-303, 307-312 | | | | |
| Cj1262 | two-component | 5-32, 50-56, 62-70, 78-84, 97-121, 132-171, 177-182, | C: 11 | 383-400 | 1136 | 1270 |
| | sensor (histidine | 188-195, 204-214, 241-250, 267-274, 276-281, | | | | |
| | kinase) | 292-309, 311-320, 333-344, 349-361, 375-395, | | | | |
| | | 398-405 | | | | |
| Cj1266c | Ni/Fe-hydrogenase | 4-10, 16-26, 59-80, 82-93, 97-115, 117-131, 148-160, | E: 1, F: 10 | 335-360, | 1137 | 1271 |
| | large subunit | 169-182, 184-210, 217-234, 241-254, 256-263, | | 427-541 | | |
| | | 265-276, 306-312, 344-350, 384-395, 400-409, | | | | |
| | | 416-423, 428-440, 449-465, 496-504, 517-555 | | | | |
| Cj1267c | Ni/Fe-hydrogenase | 4-20, 48-91, 96-115, 134-142, 171-187, 197-217, | D: 7 | 21-130 | 1138 | 1272 |
| | small chain | 222-242, 246-255, 264-270, 277-289, 305-320, | | | | |
| | | 388-352, 354-373 | | | | |
| Cj1272c | putative | 6-23, 25-53, 61-76, 83-92, 107-121, 147-166, 186-201, | C: 136 | 587-614 | 1139 | 1273 |
| | guanosine-3,5- | 207-215, 243-251, 264-274, 282-326, 333-348, | | | | |
| | bis(diphosphate) 3- | 357-366, 371-380, 401-423, 432-465, 471-477, | | | | |
| | pyrophoshatase | 481-490, 500-506, 512-525, 540-560, 583-603, | | | | |
| | | 605-612, 615-626, 647-656, 661-681, 687-693, | | | | |
| | | 713-722 | | | | |
| Cj1290c | biotin carboxylase | 4-9, 15-21, 28-35, 39-54, 59-73, 76-86, 92-108, | F: 18 | 97-175 | 1140 | 1274 |
| | | 120-134, 136-142, 145-161, 209-217, 220-228, | | | | |
| | | 236-249, 258-267, 275-282, 293-304, 306-327, | | | | |
| | | 330-340, 346-352, 354-360, 368-383, 386-392, | | | | |
| | | 401-413 | | | | |
| Cj1316c | hypothetical | 4-11, 20-30, 47-66, 72-97, 108-117, 119-129, 142-163, | E: 6, F: 13 | 301-378 | 1141 | 1275 |
| | protein | 211-219, 224-237, 243-249, 251-263, 270-288, | | | | |
| | | 295-305, 311-316, 326-333, 341-346, 367-375 | | | | |
| Cj1333 | hypothetical | 22-30, 38-45, 62-68, 78-90, 96-103, 107-114, 118-127, | E: 4 | 536-559 | 1142 | 1276 |
| | protein (1318 | 134-148, 150-173, 179-193, 195-200, 205-219, | | | | |
| | family) | 221-234, 239-248, 250-280, 282-296, 308-325, | | | | |
| | | 334-351, 363-389, 425-432, 438-443, 468-481, | | | | |
| | | 488-495, 499-517, 570-593, 602-610, 613-621, | | | | |
| | | 629-637 | | | | |
| Cj1338c | flagellin | 12-23, 26-35, 51-63, 72-78, 86-91, 135-140, 183-190, | A: 14, | 3-131, 232-331 | 1143 | 1277 |
| | | 201-209, 211-219, 241-247, 260-266, 272-281, | B: 2, | | | |
| | | 295-301, 329-335, 339-345, 355-366, 387-402, | D: 10 | | | |
| | | 428-445, 453-459, 503-517, 519-527, 531-538, | | | | |
| | | 546-553, 560-569 | | | | |
| Cj1339c | flagellin | 8-13, 25-35, 51-56, 72-78, 86-91, 135-140, 183-190, | A: 23, | 1-145, 160-183, | 1144 | 1278 |
| | | 201-209, 211-219, 241-247, 260-265, 272-281, | B: 19 | 212-334, | | |
| | | 295-301, 329-335, 339-345, 355-366, 387-402, | | 376-400 | | |
| | | 428-445, 453-459, 503-512, 519-529, 531-538, | | | | |
| | | 546-553, 560-569 | | | | |
| Cj1341c | hypothetical | 5-17, 62-71, 73-116, 118-131, 137-144, 151-158, | E: 2 | 335-348 | 1145 | 1279 |
| | protein (1318 | 160-167, 169-175, 181-190, 193-210, 212-222, | | | | |
| | family) | 231-262, 273-280, 300-329, 341-358, 363-368, | | | | |
| | | 394-400, 403-409, 416-427, 450-457, 464-470, | | | | |
| | | 478-484, 499-511, 513-529, 544-554, 558-565, | | | | |
| | | 573-589, 597-604 | | | | |
| Cj1342c | hypothetical | 4-18, 38-46, 52-60, 65-79, 93-115, 123-131, 144-154, | D: 8 | 159-243 | 1146 | 1280 |
| | protein (617 | 168-183, 191-196, 201-223, 225-236, 250-263, | | | | |
| | family) | 273-278, 289-317, 328-338, 357-373, 384-399 | | | | |
| Cj1346c | putative 1-deoxy- | 11-39, 43-52, 57-69, 72-98, 112-142, 147-154, | F: 2 | 262-323 | 1147 | 1281 |
| | D-xylulose 5- | 159-165, 167-178, 198-210, 213-227, 244-250, | | | | |
| | phosphate | 257-266, 268-286, 295-301, 305-311, 318-338, | | | | |
| | reductoisomerase | 340-346 | | | | |
| Cj1379 | putative | 4-9, 17-23, 40-49, 57-70, 72-87, 92-121, 124-133, | E: 4 | 185-212 | 1148 | 1282 |
| | selenocysteine- | 135-146, 158-164, 173-195, 204-213, 215-221, | | | | |
| | specific elongation | 230-246, 250-257, 260-273, 280-298, 304-309, | | | | |
| | factor | 311-328, 336-343, 362-371, 373-406, 409-418, | | | | |
| | | 433-446, 450-456, 490-496, 503-513, 526-542, | | | | |
| | | 548-563, 569-592 | | | | |
| Cj1380 | putative | 4-17, 23-34, 36-44, 53-62, 72-85, 87-92, 110-115, | B: 4 | 176-201 | 1149 | 1283 |
| | periplasmic | 118-123, 129-150, 155-168, 172-180, 191-197, | | | | |
| | protein | 205-211, 213-223, 225-233 | | | | |
| Cj1422c | possible sugar | 8-26, 33-44, 52-72, 78-96, 145-151, 154-171, 204-212, | E: 2 | 300-322 | 1150 | 1284 |
| | transferase | 223-230, 236-251, 261-272, 280-341, 365-374, | | | | |
| | | 385-394, 417-423, 434-447, 456-486, 494-500, | | | | |
| | | 509-519, 530-546, 556-566, 568-579, 581-603 | | | | |
| Cj1426c | hypothetical | 5-11, 14-21, 26-45, 52-67, 71-79, 82-97, 104-144, | E: 3 | 93-116 | 1151 | 1285 |
| | protein | 151-159, 183-189, 194-205, 211-223, 241-252, | | | | |
| | | 265-273, 275-280 | | | | |
| Cj1463 | hypothetical | 13-20, 55-72, 102-109 | C: 157, | 10-107 | 1152 | 1286 |
| | protein | | D: 37 | | | |
| Cj1466 | putative flagellar | 5-14, 16-22, 38-45, 51-59, 61-78, 94-102, 133-142, | A: 10 | 132-242 | 1153 | 1287 |
| | hook-associated | 153-160, 187-195, 208-221, 240-254, 256-262, | | | | |
| | protein | 270-275, 281-287, 294-299, 338-354, 356-364, | | | | |
| | | 369-378, 446-452, 506-515, 557-564, 576-599 | | | | |
| Cj1474c | putative type II | 4-29, 41-57, 66-75, 86-93, 96-102, 109-116, 124-131, | B: 1 | 250-326 | 1154 | 1288 |
| | protein secretion | 164-171, 188-194, 199-208, 214-231, 289-295, | | | | |
| | system D protein | 305-310, 314-319, 336-351, 362-368, 389-399, | | | | |
| | | 403-412, 422-433, 435-441, 444-461, 463-469 | | | | |
| Cj1478c | outer membrane | 4-16, 46-56, 59-73, 85-94, 97-105, 127-144, 160-166, | B: 1 | 59-76 | 1155 | 1289 |
| | fibronectin- | 188-194, 233-238, 245-250, 270-275, 286-291 | | | | |
| | binding protein | | | | | |
| Cj1484c | putative | 5-33, 58-64, 78-116, 119-127, 139-160, 171-190 | B: 1 | 33-56 | 1156 | 1290 |
| | membrane protein | | | | | |
| Cj1500 | putative integral | 6-11, 19-39, 50-56, 60-66, 83-133, 135-167, 195-216, | B: 1 | 170-191 | 1157 | 1291 |
| | membrane protein | 226-260, 271-319, 327-339, 342-355, 362-368, | | | | |
| | | 373-394 | | | | |
| Cj1506c | putative MCP-type | 4-37, 45-51, 106-119, 132-138, 150-156, 160-171, | F: 38 | 552-658 | 1158 | 1292 |
| | signal transduction | 176-182, 193-203, 207-215, 222-229, 237-244, | | | | |
| | protein | 253-261, 296-372, 403-409, 416-422, 440-449, | | | | |
| | | 451-460, 471-485, 504-510, 538-551, 560-569, | | | | |
| | | 573-582, 585-597, 606-617, 632-646, 658-666, | | | | |
| | | 668-676, 685-694 | | | | |
| Cj1511c | putative formate | 16-32, 53-79, 81-96, 102-111, 124-130, 145-152, | B: 3 | 14-34 | 1159 | 1293 |
| | dehydrogenase | 159-168, 176-189, 206-231, 236-244, 251-258, | | | | |
| | large subunit | 286-292, 304-310, 315-326, 351-361, 383-390, | | | | |
| | | 392-398, 405-411, 430-436, 456-464, 470-480, | | | | |
| | | 482-496, 505-513, 531-540, 546-558, 583-589, | | | | |
| | | 601-607, 621-634, 638-644, 667-673, 681-687, | | | | |
| | | 693-702, 721-733, 737-744, 747-757, 760-767, | | | | |
| | | 772-789, 796-807, 828-823, 846-852, 856-866, | | | | |
| | | 868-880, 882-890, 913-919, 923-929 | | | | |
| Cj1545c | MdaB protein | 19-42, 55-67, 75-95, 144-156, 168-175, 183-189 | B: 2 | 98-109 | 1160 | 1294 |
| | homolog | | | | | |
| Cj1552c | hypothetical | 7-17, 22-27, 34-61, 88-97, 110-117, 152-159, 175-191, | F: 4 | 199-269 | 1161 | 1295 |
| | protein | 202-213, 220-232, 267-285, 296-315, 341-347, | | | | |
| | | 376-392, 400-408, 421-430, 453-462, 464-470, | | | | |
| | | 478-485 | | | | |
| Cj1553c | putative type I | 27-44, 71-80, 114-123, 127-140, 149-167, 175-188, | B: 4 | 3-25 | 1162 | 1296 |
| | restriction enzyme | 191-202, 205-217, 222-227, 270-276, 297-302, | | | | |
| | M protein | 308-318, 324-332, 349-368, 370-376, 382-393, | | | | |
| | | 432-441, 445-459, 472-481, 489-496 | | | | |
| Cj1564 | putative methyl- | 16-49, 57-63, 84-92, 100-120, 124-130, 160-183, | B: 7 | 474-504 | 1163 | 1297 |
| | accepting | 189-200, 202-209, 236-244, 263-280, 283-334, | | | | |
| | chemotaxis signal | 341-346, 377-389, 405-423, 452-458, 485-493, | | | | |
| | transd. protein | 505-513, 518-530, 547-559, 568-579, 595-601, | | | | |
| | | 619-625, 638-649 | | | | |
| Cj1584c | putative peptide | 4-18, 21-30, 43-54, 76-83, 85-106, 116-122, 124-160, | B: 2 | 376-395 | 1164 | 1298 |
| | ABC-transport | 180-185, 198-204, 206-222, 230-242, 258-263, | | | | |
| | system periplasmic | 270-302, 325-332, 359-371, 374-386, 391-402, | | | | |
| | | 411-417, 435-443, 458-485 | | | | |
| Cj1609 | possible sulfate | 17-26, 28-34, 54-62, 83-93, 108-114, 119-125, | E: 2 | 132-153 | 1165 | 1299 |
| | adenylyltransferase | 151-164, 175-187, 197-222, 224-232, 234-250, | | | | |
| | | 265-270, 276-313, 315-342, 373-383 | | | | |
| Cj1622 | putative | 25-42, 47-53, 55-80, 86-113, 116-126, 128-135, | B: 2 | 144-155 | 1166 | 1300 |
| | riboflavin-specific | 151-159, 167-174, 179-188, 207-221, 226-248, | | | | |
| | deaminase | 257-266, 269-279, 297-304, 312-325 | | | | |
| Cj1634c | chorismate | 16-26, 61-71, 75-85, 95-113, 126-163, 175-184, | B: 1 | 57-76 | 1167 | 1301 |
| | synthase | 202-246, 286-291, 293-302, 320-349 | | | | |
| Cj1670c | putative | 4-19, 29-36, 48-59, 92-103, 117-139, 154-164, | B: 3 | 87-113 | 1168 | 1302 |
| | periplasmic | 190-201 | | | | |
| | protein | | | | | |
| Cj1678 | possible | 43-51, 98-108, 123-130, 149-159, 168-179, 182-188, | B: 4, E: 3 | 676-694, | 1169 | 1303 |
| | lipoprotein | 201-207, 231-240, 334-340, 346-354, 369-378, | | 855-881 | | |
| | | 462-472, 493-503, 510-518, 520-538, 565-572, | | | | |
| | | 584-590, 592-598, 616-628, 637-646, 659-675, | | | | |
| | | 688-694, 699-705, 724-732, 740-755, 771-780, | | | | |
| | | 792-801, 827-833, 846-856, 873-880, 882-906 | | | | |
| Cj1694c | 30S ribosomal | 15-45 | E: 2 | 29-60 | 1170 | 1304 |
| | protein S14 | | | | | |
| Cj1718c | 3-isopropylmalate | 4-11, 15-34, 49-77, 92-121, 128-139, 169-176, | B: 2 | 250-277 | 1171 | 1305 |
| | dehydrogenase | 181-210, 216-222, 225-231, 233-246, 248-264, | | | | |
| | | 271-276, 282-306, 319-326, 346-352 | | | | |
| Cj1729c | flagellar hook | 6-20, 46-54, 64-79, 81-87, 131-138, 156-162, 170-178, | D: 8 | 436-529 | 1172 | 1306 |
| | subunit protein | 190-198, 226-232, 254-263, 266-274, 293-303, | | | | |
| | | 313-323, 363-369, 419-424, 426-432, 436-455, | | | | |
| | | 507-513, 515-521, 534-547, 553-559, 596-610, | | | | |
| | | 617-636, 638-647, 659-665, 677-683, 691-696, | | | | |
| | | 710-718, 724-730, 750-755, 770-780, 802-808, | | | | |
| | | 824-842, 857-862 | | | | |
| ARF0021 | Hypothetical | 11-25 | E: 3 | 21-35 | 1173 | 1307 |
| | protein | | | | | |
| ARF0203 | Hypothetical | none | E: 5 | 1-12 | 1174 | 1308 |
| | protein | | | | | |
| ARF0266c | Hypothetical | 4-10 | E: 1 | 2-11 | 1175 | 1309 |
| | protein | | | | | |
| ARF0357c | Hypothetical | 12-20 | B: 5 | 5-14 | 1176 | 1310 |
| | protein | | | | | |
| ARF0585 | Hypothetical | none | E: 3 | 3-10 | 1177 | 1311 |
| | protein | | | | | |
| ARF0781 | Hypothetical | 4-22 | E: 3 | 10-21 | 1178 | 1312 |
| | protein | | | | | |
| ARF1045c | Hypothetical | 4-30, 35-50 | B: 3 | 17-32 | 1179 | 1313 |
| | protein | | | | | |
| ARF1169c | Hypothetical | none | E: 2 | 1-20 | 1180 | 1314 |
| | protein | | | | | |
| ARF1342c | Hypothetical | 16-21 | B: 7 | 7-22 | 1181 | 1315 |
| | protein | | | | | |
| ARF1379 | Hypothetical | 5-13 | B: 3 | 7-18 | 1182 | 1316 |
| | protein | | | | | |
| ARF1410c | Hypothetical | 10-17 | B: 2 | 16-29 | 1183 | 1317 |
| | protein | | | | | |
| ARF1454c | Hypothetical | 17-27 | E: 2 | 22-34 | 1184 | 1318 |
| | protein | | | | | |
| ARF1669c | Hypothetical | 12-18 | E: 2 | 9-21 | 1185 | 1319 |
| | protein | | | | | |
| CRF0036 | Hypothetical | 4-11, 13-94, 100-111, 115-134 | C: 10 | 89-106 | 1186 | 1320 |
| | protein | | | | | |
| CRF0037c | Hypothetical | 4-24 | C: 12 | 10-27 | 1187 | 1321 |
| | protein | | | | | |
| CRF0174c | Hypothetical | 4-14 | B: 15 | 12-23 | 1188 | 1322 |
| | protein | | | | | |
| CRF0337c | Hypothetical | 18-33 | B: 13 | 13-33 | 1189 | 1323 |
| | protein | | | | | |
| CRF0412 | Hypothetical | 16-23, 25-48 | E: 3 | 29-40 | 1190 | 1324 |
| | protein | | | | | |
| CRF0442 | Hypothetical | 4-12, 25-64, 68-76 | D: 61 | 4-61 | 1191 | 1325 |
| | protein | | | | | |
| CRF0631c | Hypothetical | 4-57, 59-66, 96-104 | C: 8 | 76-91 | 1192 | 1326 |
| | protein | | | | | |
| CRF0999c | Hypothetical | 23-43, 45-75, 97-107, 112-121 | F: 35 | 26-62 | 1193 | 1327 |
| | protein | | | | | |
| CRF1009c | Hypothetical | none | C: 12 | 10-24 | 1194 | 1328 |
| | protein | | | | | |
| CRF1059c | Hypothetical | 4-50 | E: 3 | 30-44 | 1195 | 1329 |
| | protein | | | | | |
| CRF1123c | Hypothetical | 4-20, 24-43 | E: 4 | 10-24 | 1196 | 1330 |
| | protein | | | | | |
| CRF1246c | Hypothetical | 4-49, 56-66 | D: 15 | 5-54 | 1197 | 1331 |
| | protein | | | | | |
| CRF1257c | Hypothetical | 33-44 | B: 8 | 15-38 | 1198 | 1332 |
| | protein | | | | | |
| CRF1287c | Hypothetical | 4-36, 39-50 | E: 3 | 32-47 | 1199 | 1333 |
| | protein | | | | | |
| CRF1502c | Hypothetical | 4-9, 16-30, 32-38 | B: 8 | 15-32 | 1200 | 1334 |
| | protein | | | | | |
| CRF1567c | Hypothetical | 4-9 | B: 8 | 27-42 | 1201 | 1335 |
| | protein | | | | | |
| CRF1582c | Hypothetical | 4-16, 32-43, 49-58, 64-72 | E: 4 | 14-27 | 1202 | 1336 |
| | protein | | | | | |

A, 50 bp library of C. jejuni NCTC 11168 in LamB with P12-IgG (628),
B, 50 bp library in LamB with P12-IgG (705),
C, 50 bp library in LamB with P12-IgA (691),
D, 300 bp library in FhuA with P12-IgA (464),
E, 50 bp library in lamB with IC11-IgG (698),
F, 300 bp library in FhuA with IC11-IgG (815),
*prediction of antigenic sequences longer than 5 amino acids was performed with the program ANTIGENIC {Kolaskar, A. et al., 1990}.

[0337] TABLE 4
Immunogenic proteins identified from enteroaggregative E. coli (EAEC) by bacterial surface display.

| Antigenic | Homolog | | Seq. | Seq. |
|---|---|---|---|---|
| protein in | in E. coli | | ID | ID |
| EAEC | O157:H7 | predicted immunogenic aa* | (DNA) | (Protein) |
| EAEC32 | ECs0014 | 12-19, 24-29, 37-43, 47-53, 65-72, 83-95, 112-122, 136-147, 162-168, 174-181, | 601 | 763 |
| | | 189-195, 201-208, 216-221, 234-243, 270-276, 278-288, 305-316, 318-342, | | |
| | | 350-356, 368-400, 420-428, 434-443, 471-477, 481-488, 530-535, 540-547, | | |
| | | 566-575, 591-601, 603-609, 624-629 | | |
| EAEC33 | ECs0067 | 11-22, 28-34, 40-45, 65-86, 99-107, 115-125, 132-141, 143-150, 158-190, | 602 | 764 |
| | | 203-211, 216-239, 246-257, 259-270, 272-279, 286-306, 313-332, 338-364, | | |
| | | 371-380, 389-397, 410-418, 422-435, 467-510, 515-521, 532-538, 547-563 | | |
| EAEC34 | ECs0089 | 7-20, 28-45, 51-66, 81-104, 108-115, 124-137, 149-155, 161-206, 209-214, | 603 | 765 |
| | | 222-239, 250-262, 274-282, 309-343, 351-363, 365-386, 405-413, 435-440, | | |
| | | 446-454, 458-466, 470-477, 482-492 | | |
| EAEC35 | ECs0152 | 10-25, 29-35, 39-46, 54-71, 82-88, 102-111, 122-137, 139-145, 152-160, | 604 | 766 |
| | | 162-172, 176-182, 193-201, 209-218, 226-232, 242-249, 258-268, 299-314, | | |
| | | 318-344, 362-376, 393-399, 405-418, 426-463, 473-485, 487-492, 498-503, | | |
| | | 518-544, 561-567 | | |
| EAEC36 | ECs0153 | 16-23, 66-90, 98-110, 125-131, 144-150, 194-200, 213-219, 221-232, 237-256, | 605 | 767 |
| | | 263-281, 293-298, 311-318, 326-337, 339-354, 373-389, 396-402, 404-421, | | |
| | | 427-439, 441-448, 452-462, 467-479, 508-530, 534-541, 544-550, 562-569, | | |
| | | 575-581, 583-592, 595-628, 636-656, 658-672, 674-680, 687-697, 715-721 | | |
| | | 731-736, 739-749, 754-761, 771-788, 790-797, 813-824 | | |
| EAEC37 | ECs0155 | 14-42, 51-57, 66-77, 84-96, 103-111, 129-148, 158-193, 198-208, 212-222, | 606 | 768 |
| | | 242-262 | | |
| EAEC38 | ECs0156 | 4-23, 29-62, 65-84, 98-104, 128-135, 144-161, 167-173, 175-204, 219-240, | 607 | 769 |
| | | 250-264, 266-278, 280-290 | | |
| EAEC39 | ECs0174 | 13-26, 33-45, 50-60, 75-81, 97-105, 123-131, 138-145, 158-166, 168-177 | 608 | 770 |
| EAEC40 | ECs0218 | 6-20, 23-44, 50-61, 67-82, 84-91, 104-125, 133-144, 149-156, 159-166, 173-180, | 609 | 771 |
| | | 182-196, 200-206, 224-239, 245-288, 320-339, 342-349, 359-368, 377-385, | | |
| | | 411-419, 427-435, 453-474, 481-489, 491-497, 505-514, 516-522, 536-564, | | |
| | | 579-586, 618-631, 644-650, 654-661, 663-677, 679-689, 700-705, 710-753, | | |
| | | 795-801, 809-814, 821-827, 842-851, 867-905, 920-925, 931-949, 954-961, | | |
| | | 1017-1022, 1034-1040, 1047-1057, 1062-1075, 1081-1086, 1107-1117, | | |
| | | 1119-1126, 1145-1154, 1162-1172 | | |
| EAEC41 | ECs0314 | 13-21, 47-57, 72-83, 97-102, 105-119, 125-133, 146-153, 170-177, 221-239, | 610 | 772 |
| | | 245-273, 283-291, 299-305, 317-329, 335-343, 358-367, 374-380, 399-407, | | |
| | | 430-438, 449-454, 473-479, 433-505, 517-527, 531-537, 555-560, 586-599, | | |
| | | 601-616, 623-629, 639-647, 649-654, 658-667, 669-676, 690-709, 714-729 | | |
| EAEC42 | ECs0315 | 14-28, 34-40, 45-54, 69-76, 78-83, 86-100, 116-123, 135-143, 146-161, 168-179, | 611 | 773 |
| | | 187-200, 204-225, 236-250, 255-265, 271-292, 298-314 | | |
| EAEC43 | ECs0320 | 4-28, 36-42, 78-85, 106-122, 130-136, 144-150, 161-175, 180-190, 194-200, | 612 | 774 |
| | | 226-234, 256-265, 274-294, 309-316, 324-333, 336-344, 373-379, 382-389, | | |
| | | 398-404, 407-416, 422-446, 451-462, 530-541 | | |
| EAEC44 | ECs0322 | 4-15, 17-42, 71-77, 80-86, 90-116, 123-135, 144-150, 153-163, 183-194 | 613 | 775 |
| EAEC45 | ECs0336 | 7-13, 22-42, 56-62, 84-90, 102-112, 121-133, 140-148, 158-167, 173-181, | 614 | 776 |
| | | 192-199, 227-234, 284-293, 301-307, 336-343, 345-353, 366-372, 376-397, | | |
| | | 400-436, 439-450, 467-478, 504-510, 519-530, 532-547, 551-558, 564-575, | | |
| | | 592-598, 619-630, 636-642, 655-661, 663-669, 671-679, 697-718, 724-736, | | |
| | | 738-752, 759-773, 776-788, 805-823, 827-833, 842-852, 859-864, 874-881, | | |
| | | 883-889, 905-914, 932-939, 941-957, 963-969, 978-991, 1011-1025, 1052-1062, | | |
| | | 1067-1073, 1080-1088, 1106-1112, 1121-1132, 1139-1152 | | |
| ETEC47 | ECs0345 | 9-23, 32-38, 44-54, 64-71, 95-126, 146-154, 163-173, 190-196, 199-206, | 615 | 777 |
| | | 249-256, 262-277, 291-302, 350-356, 380-398, 406-413, 420-430, 433-444, | | |
| | | 471-478, 492-507 | | |
| EAEC46 | ECs0453 | 5-26, 57-66, 68-74, 81-87, 105-116, 122-132, 144-160, 185-212, 217-223, | 616 | 778 |
| | | 228-234, 241-252, 269-274, 291-313, 318-328, 335-342, 368-375, 397-404, | | |
| | | 411-422, 431-439, 462-472, 474-485, 493-499, 509-519, 521-527, 530-558, | | |
| | | 563-579, 590-602 | | |
| EAEC47 | ECs0454 | 9-23, 32-38, 44-54, 64-71, 95-126, 146-154, 163-173, 190-196, 199-206, | 617 | 779 |
| | | 249-256, 262-277, 291-302, 350-356, 380-398, 406-413, 420-430, 433-444, | | |
| | | 471-478, 492-507 | | |
| EAEC48 | ECs0541 | 18-31, 34-53, 57-67, 74-81, 90-106, 136-144, 147-153, 157-163, 170-182, | 618 | 780 |
| | | 192-207, 233-241, 245-251, 256-267, 274-281, 284-306, 318-330, 333-340, | | |
| | | 345-351, 356-379, 388-404, 428-439, 455-466, 468-480, 488-505, 515-526, | | |
| | | 553-564, 571-577, 594-600, 607-614, 616-628, 634-642, 644-651, 655-666, | | |
| | | 672-678, 686-703, 732-738, 745-751, 755-768, 772-778, 785-805, 807-814, | | |
| | | 817-825, 831-853, 858-868, 890-905, 918-926, 934-942, 957-970, 972-981, | | |
| | | 990-1001, 1057-1067, 1069-1077, 1089-1109, 1116-1130, 1133-1141, 1154-1165, | | |
| | | 1190-1206, 1208-1215, 1217-1225, 1228-1254, 1256-1263, 1271-1279, | | |
| | | 1283-1305, 1333-1339, 1357-1367, 1373-1379, 1388-1405, 1432-1442, | | |
| | | 1444-1451, 1453-1461, 1463-1479, 1488-1504, 1516-1524, 1532-1540, | | |
| | | 1555-1568, 1589-1600, 1607-1613, 1633-1638, 1655-1665, 1687-1704, | | |
| | | 1721-1728, 1731-1737, 1744-1763, 1793-1804, 1816-1823, 1833-1850, | | |
| | | 1855-1865, 1868-1875, 1886-1902, 1916-1925, 1931-1937, 1954-1967, | | |
| | | 1971-1977, 1987-2002, 2009-2015, 2030-2036, 2043-2049, 2053-2077, | | |
| | | 2085-2098, 2114-2122, 2129-2136, 2154-2167, 2187-2203, 2232-2243, | | |
| | | 2253-2274, 2286-2303, 2311-2323, 2344-2365, 2371-2378, 2388-2404, | | |
| | | 2406-2413, 2415-2424, 2426-2450, 2454-2461, 2469-2475, 2486-2505 | | |
| EAEC50 | ECs0548 | 4-22, 24-30, 33-39, 60-72, 83-89, 128-137, 153-161, 165-174, 186-194, 212-218, | 619 | 781 |
| | | 251-260, 275-284, 288-297, 309-318, 335-341, 374-383, 399-407, 411-420, | | |
| | | 432-440, 467-482, 518-526, 572-579, 595-609, 649-663, 680-686, 691-702, | | |
| | | 708-714 | | |
| EAEC51 | ECs0600 | 11-25, 39-57, 69-94, 100-107, 118-155, 158-171, 189-201, 226-233, 236-245, | 620 | 782 |
| | | 249-262, 287-296, 298-312, 315-329, 333-342, 351-359, 364-374, 382-388, | | |
| | | 399-407, 411-417, 419-449, 454-471, 486-492, 494-504, 515-541, 547-552, | | |
| | | 582-600, 611-623, 625-641, 651-657, 678-692, 699-709, 713-720, 746-752, | | |
| | | 772-781, 791-804, 829-844, 880-893, 900-910, 915-923, 936-942, 953-970 | | |
| EAEC52 | ECs0689 | 5-11, 17-24, 26-32, 36-43, 50-61, 67-73, 91-102, 111-126, 133-148, 154-161, | 621 | 783 |
| | | 167-173, 179-195, 208-223, 230-240, 242-253, 270-286, 292-306, 308-347, | | |
| | | 352-371, 373-380, 386-395, 404-410, 418-433, 436-444, 447-460, 463-477, | | |
| | | 486-492, 522-533, 548-553 | | |
| EAEC53 | ECs0819 | 4-12, 15-27, 35-55, 68-95, 100-109, 117-122, 129-135, 157-162 | 622 | 784 |
| EAEC54 | ECs0872 | 25-46, 59-65, 68-75, 83-90, 93-100, 107-115, 124-135, 151-177, 183-189, | 623 | 785 |
| | | 194-206, 209-215, 219-224, 251-263, 267-276, 305-311, 318-327, 332-338, | | |
| | | 350-356, 380-396, 406-412, 414-423, 431-437, 453-461, 463-481, 483-491, | | |
| | | 505-510, 513-523, 528-545, 568-575 | | |
| EAEC55 | ECs0883 | 10-35, 42-59, 65-70, 76-85, 92-104, 149-155, 184-191, 234-243, 248-259, | 624 | 786 |
| | | 268-277, 279-287, 391-398, 410-430, 445-454, 488-494, 498-504, 518-523, | | |
| | | 530-538, 574-590, 615-623, 627-633, 652-660, 662-670, 674-683, 703-714, | | |
| | | 720-728, 731-737, 751-757 | | |
| EAEC56 | ECs0931 | 5-12, 39-51, 57-64, 67-84, 86-108, 124-130, 139-159, 167-179, 181-202, | 625 | 787 |
| | | 226-235 | | |
| EAEC57 | ECs0954 | 12-20, 29-40, 57-77, 79-88, 97-103, 111-117, 119-137, 174-200, 202-218, | 626 | 788 |
| | | 221-229, 231-238, 240-246, 254-264, 266-280, 296-308, 321-331 | | |
| EAEC58 | ECs0987 | 4-18, 20-48, 54-68, 80-105, 110-117, 120-130, 132-167, 179-214, 227-246, | 627 | 789 |
| | | 259-295, 306-323, 332-339, 345-351, 357-363, 366-374, 379-392 | | |
| EAEC59 | ECs1044 | 8-21, 23-31, 53-66, 69-94, 99-113, 119-184, 190-214, 233-244, 268-274, | 628 | 790 |
| | | 279-284, 289-298, 300-311, 315-337, 344-350, 364-383, 385-397 | | |
| EAEC60 | ECs1433 | 26-38, 43-63, 67-76, 79-98, 105-112, 115-121, 132-144, 148-153, 179-184, | 629 | 791 |
| | | 194-203, 239-245, 261-278, 282-315 | | |
| EAEC61 | ECs1462 | 13-22, 24-30, 49-61, 65-72, 90-97, 99-105, 115-131, 152-160, 165-171, 176-188, | 630 | 792 |
| | | 202-221, 231-250, 255-274, 280-286, 288-296, 331-337, 339-347, 350-358, | | |
| | | 374-385, 391-408, 418-427, 438-453, 468-476, 482-490, 497-506, 526-532, | | |
| | | 534-583, 696-702, 713-719, 730-748, 750-758, 762-778, 802-808, 825-857, | | |
| | | 864-950, 963-1004, 1015-1023, 1046-1058 | | |
| EAEC62 | ECs1643 | 4-10, 22-28, 35-44, 58-66, 74-84, 86-98, 116-131, 138-143, 181-186, 224-230, | 631 | 793 |
| | | 241-253, 282-292, 305-313, 325-331, 333-341, 348-360, 384-391, 395-408, | | |
| | | 415-429, 431-445, 525-531, 558-564, 567-584, 601-612, 624-637, 645-652, | | |
| | | 682-687, 700-706 | | |
| EAEC63 | ECs1650 | 4-13, 19-27, 33-40, 57-82, 107-115, 117-125, 162-173, 197-206, 215-226, | 632 | 794 |
| | | 256-266, 291-298, 303-310, 318-323, 331-336, 345-360, 379-396, 405-410, | | |
| | | 426-434, 454-462, 468-476, 482-497, 512-518, 529-541, 556-564, 570-581, | | |
| | | 589-594, 601-610, 629-637, 639-648, 663-670, 704-711, 725-738, 746-768, | | |
| | | 770-780, 787-804, 817-823, 830-837, 876-882, 930-936, 939-968 | | |
| EAEC64 | ECs1736 | 5-13, 20-65, 67-74, 107-115, 128-169, 171-195, 238-244, 256-287, 292-298 | 633 | 795 |
| EAEC65 | ECs1752 | 7-13, 16-77, 89-96, 104-114, 117-125, 148-160, 167-191, 193-202, 227-236 | 634 | 796 |
| EAEC66 | ECs1905 | 21-36, 41-47, 54-89, 122-129, 138-165, 173-190, 196-216, 221-229 | 635 | 797 |
| EAEC67 | ECs2026 | 8-45, 135-140, 172-182, 189-196, 206-216, 218-235, 260-269, 272-278, | 636 | 798 |
| | | 307-313, 333-344, 352-359, 371-395, 403-414, 416-422, 426-438, 451-470, | | |
| | | 478-484, 493-502, 504-511, 514-533 | | |
| EAEC68 | ECs2036 | 6-25, 49-59, 65-96, 107-115, 117-124, 135-151, 176-185, 203-209 | 637 | 799 |
| EAEC69 | ECs2037 | 5-15, 46-56, 58-81, 83-111, 118-138, 152-160, 165-175 | 638 | 800 |
| EAEC70 | ECs2044 | 7-16, 18-24, 36-43, 54-60, 65-73, 88-94, 107-113, 122-128, 134-141, 162-171, | 639 | 801 |
| | | 182-216, 218-235, 249-263, 266-278, 290-301, 308-338 | | |
| EAEC71 | ECs2048 | 4-14, 19-24, 27-36, 38-51, 63-73, 90-96, 102-121, 138-150, 157-174, 176-202, | 640 | 802 |
| | | 212-225, 229-245, 250-258, 261-268, 279-291, 293-310, 319-338, 358-368, | | |
| | | 371-389, 393-398, 404-413, 416-433, 435-442, 458-471 | | |
| EAEC72 | ECs2091 | 17-40, 47-82, 85-93, 101-113, 153-172, 180-186, 190-208, 215-224, 252-261, | 641 | 803 |
| | | 269-279, 283-289, 294-306, 311-328, 397-408, 416-423, 425-437, 492-499, | | |
| | | 513-534, 542-548, 550-555 | | |
| EAEC73 | ECs2362 | 8-17, 29-43, 45-52, 58-69, 87-100, 102-112, 148-163, 172-187, 190-208, | 642 | 804 |
| | | 210-227, 232-239, 245-253, 258-263, 286-299, 313-334, 346-362, 373-388, | | |
| | | 391-410, 417-423, 425-430, 434-446, 457-472, 483-489, 496-502, 518-524, | | |
| | | 537-546, 555-560, 602-610, 637-646, 676-689, 698-704, 706-742, 750-778, | | |
| | | 780-791, 806-842, 864-879, 881-888, 890-899, 901-908, 910-921, 941-947, | | |
| | | 953-959, 967-980, 990-995, 1000-1061, 1073-1079, 1081-1092, 1096-1118, | | |
| | | 1121-1168, 1174-1185, 1195-1209, 1219-1232, 1237-1243, 1250-1274, | | |
| | | 1276-1286, 1302-1319, 1324-1333, 1339-1344, 1349-1361, 1370-1376, | | |
| | | 1418-1427, 1435-1449, 1453-1469, 1473-1478, 1482-1495, 1509-1517, | | |
| | | 1519-1526 | | |
| EAEC74 | ECs2389 | 4-14, 16-32, 42-47, 65-71, 82-109, 128-145, 158-171, 177-191, 197-228, | 643 | 805 |
| | | 230-236 | | |
| EAEC75 | ECs2394 | 16-22, 26-42, 52-72, 75-89, 97-102, 114-147, 154-160, 165-170, 172-200, | 644 | 806 |
| | | 202-229, 231-244, 256-261, 267-278, 286-294, 312-319, 330-336, 340-346, | | |
| | | 360-373, 375-383, 386-396, 420-441, 443-474, 484-491, 496-517, 535-574, | | |
| | | 600-606, 608-624, 636-643, 646-658, 664-687, 692-703, 716-725, 733-750, | | |
| | | 755-764 | | |
| EAEC76 | ECs2467 | 4-14, 24-34, 47-69, 81-90, 98-112, 144-153, 161-169, 189-196, 202-208, | 645 | 807 |
| | | 213-220, 243-249, 256-262, 265-271, 279-286, 299-307, 310-324, 326-345, | | |
| | | 356-369, 397-416, 424-429, 432-441 | | |
| EAEC77 | ECs2527 | 4-9, 14-23, 50-56, 59-68, 77-102, 111-120, 126-152, 161-167, 174-180, 189-202, | 646 | 808 |
| | | 204-228, 237-245, 259-266, 278-285, 300-309 | | |
| EAEC78 | ECs2662 | 23-35, 71-77, 94-100, 134-140, 157-163, 189-195, 211-219, 221-231, 238-244, | 647 | 809 |
| | | 246-253, 263-277, 298-306, 315-321, 337-342, 350-355, 369-377, 389-400, | | |
| | | 408-416, 422-427, 441-449, 465-477, 481-488, 527-532, 534-551 | | |
| EAEC79 | ECs2670 | 14-20, 35-48, 53-63, 71-77, 95-101, 114-121, 123-133, 144-151, 153-160, | 648 | 810 |
| | | 162-170, 190-197, 201-211 | | |
| EAEC80 | ECs2676 | 9-17, 26-46, 65-72, 90-101 | 649 | 811 |
| EAEC81 | ECs2699 | 21-39, 46-53, 68-96, 107-113, 118-124, 126-135, 158-185, 196-202, 204-213, | 650 | 812 |
| | | 219-226, 246-253, 267-275, 277-285, 299-317, 319-338, 404-410, 421-428, | | |
| | | 435-463 | | |
| EAEC82 | ECs2776 | 17-24, 29-40, 47-56 | 651 | 813 |
| EAEC83 | ECs2865 | 17-25, 32-77, 82-91, 100-128, 161-169, 194-207, 211-218, 227-232, 239-245, | 652 | 814 |
| | | 255-260, 278-300, 311-325, 342-356, 382-390, 393-401, 416-460, 467-487, | | |
| | | 491-503, 505-512, 516-532, 551-565, 568-575, 594-601, 610-632, 638-643, | | |
| | | 647-670, 672-685, 699-710, 712-726 | | |
| EAEC84 | ECs3019 | 5-14, 25-46, 49-55, 59-65, 77-85, 98-107, 125-169, 181-186, 223-240, 271-281, | 653 | 815 |
| | | 290-300, 306-313, 315-322, 330-337, 348-359, 370-377, 384-392, 416-424, | | |
| | | 428-445, 456-469, 479-486, 502-510, 518-523, 525-535, 555-575, 578-585, | | |
| | | 605-612, 624-637, 661-685, 693-700, 708-721, 723-729, 744-754, 770-775 | | |
| EAEC85 | ECs3081 | 4-33, 38-52, 92-106, 116-124, 133-138, 142-148, 153-159, 161-168, 245-257, | 654 | 816 |
| | | 282-287, 314-321, 331-336, 355-361, 366-372, 374-390, 396-409, 447-455, | | |
| | | 484-490, 498-504, 511-519, 531-538, 540-545, 574-581, 586-596, 625-631, | | |
| | | 644-655, 668-674, 685-692, 718-723, 728-741, 771-778, 787-797, 801-807, | | |
| | | 819-828, 832-844 | | |
| EAEC86 | ECs3103 | 5-25, 31-39, 72-79, 93-102, 104-110, 122-132, 138-146, 157-189, 192-198, | 655 | 817 |
| | | 205-214, 226-233, 240-248, 269-275, 282-298, 304-310, 313-327, 342-348 | | |
| EAEC87 | ECs3111 | 12-39, 49-55, 59-69, 95-104, 106-111, 116-128, 161-184, 186-217, 229-237, | 656 | 818 |
| | | 240-252, 254-269, 271-278, 311-326, 331-338, 348-356, 364-370, 375-408, | | |
| | | 429-460, 471-482, 484-500, 508-516, 527-536, 539-548, 560-576, 583-605, | | |
| | | 643-655, 662-676, 682-687, 691-697, 703-715, 726-734, 737-746, 757-768, | | |
| | | 778-789, 791-814, 821-826, 834-854, 890-899, 914-925, 947-954, 959-967, | | |
| | | 984-990, 993-1000, 1012-1021, 1039-1044, 1065-1070, 1081-1098, 1136-1142, | | |
| | | 1149-1157, 1165-1170, 1175-1186, 1191-1201, 1225-1265, 1276-1285, | | |
| | | 1292-1300, 1323-1333, 1351-1361, 1366-1372, 1383-1397, 1404-1412, | | |
| | | 1417-1425, 1431-1448, 1468-1473, 1483-1494, 1496-1504, 1506-1530 | | |
| EAEC88 | ECs3114 | 18-53, 64-93, 95-105, 124-135, 143-148, 155-161, 163-171, 184-198, 238-245, | 657 | 819 |
| | | 258-271, 273-284, 287-292, 302-310, 312-320, 322-341, 349-365, 377-403, | | |
| | | 407-414, 417-423, 444-453, 455-469, 471-495, 503-511, 536-557, 579-586, | | |
| | | 588-609, 619-626, 632-638, 643-649, 656-663, 669-680, 682-688, 699-714, | | |
| | | 729-739, 755-761, 768-776, 781-793, 801-815, 821-826, 833-842, 863-869 | | |
| EAEC89 | ECs3126 | 8-15, 24-40, 51-65, 78-89, 102-111, 117-154, 164-177, 181-192, 198-209, | 658 | 820 |
| | | 216-222, 230-237, 241-248, 254-268, 285-293, 298-321, 331-338, 366-373, | | |
| | | 384-389, 392-415, 429-439, 441-451, 453-459, 471-486, 489-501, 524-535 | | |
| EAEC90 | ECs3137 | 10-18, 26-38, 48-54, 60-69, 77-83, 88-95, 119-126, 133-169, 172-185, 193-206, | 659 | 821 |
| | | 214-225, 236-250, 269-275, 278-301, 320-329, 336-341, 347-353, 356-369, | | |
| | | 389-396 | | |
| EAEC91 | ECs3205 | 27-32, 37-50, 68-82, 84-108, 134-145, 149-154, 162-170, 172-182, 194-200, | 660 | 822 |
| | | 205-224, 232-270, 293-299, 312-328 | | |
| EAEC92 | ECs3213 | 8-14, 19-45, 65-75, 82-87, 95-105, 135-149, 154-160, 175-184, 205-226, | 661 | 823 |
| | | 229-244, 249-256, 284-296, 298-304, 321-348 | | |
| EAEC93 | ECs3225 | 4-10, 15-24, 26-53, 55-71, 78-83, 90-112, 128-148, 156-163, 165-179, 203-213, | 662 | 824 |
| | | 228-239, 250-259, 277-285, 292-314, 322-330, 335-340, 345-360, 363-370, | | |
| | | 381-396, 404-409, 416-427 | | |
| EAEC94 | ECs3322 | 20-32, 37-46, 53-65, 75-83, 86-95, 99-105, 121-133, 139-151, 183-190, 199-205, | 663 | 825 |
| | | 216-227 | | |
| EAEC95 | ECs3330 | 9-25, 29-48, 50-100, 102-126, 131-149, 167-173, 210-217, 224-256, 259-265, | 664 | 826 |
| | | 275-292, 295-301, 308-313, 319-335, 337-346, 352-359, 362-382, 393-423, | | |
| | | 436-449, 468-476, 481-487, 492-500, 526-534, 537-548, 560-567, 569-579, | | |
| | | 590-598, 604-613, 629-636, 644-656 | | |
| EAEC96 | ECs3386 | 4-18, 25-31, 33-39, 42-53, 64-92, 97-111, 123-129, 134-146, 165-171, 173-190, | 665 | 827 |
| | | 192-213, 226-239, 251-273, 283-298, 316-324, 339-345, 350-356, 361-376, | | |
| | | 400-408, 418-440, 444-451, 476-481, 503-516, 524-542, 555-563, 581-594, | | |
| | | 607-629, 634-641, 647-670, 711-719, 728-738, 755-765, 772-780, 800-815, | | |
| | | 822-833, 842-852, 860-865, 874-880, 891-913, 926-938, 941-946, 961-978, | | |
| | | 984-990, 1014-1024, 1038-1044, 1052-1092, 1099-1111, 1120-1140, | | |
| | | 1153-1168, 1170-1190, 1193-1210, 1221-1233, 1253-1264, 1268-1274, | | |
| | | 1283-1289, 1295-1300, 1303-1327, 1338-1351, 1362-1368, 1391-1396, | | |
| | | 1410-1416, 1429-1441, 1471-1477, 1483-1513, 1526-1555, 1585-1591, | | |
| | | 1596-1630, 1632-1639 | | |
| EAEC97 | ECs3414 | 10-25, 34-54, 57-67, 77-96, 111-121, 127-139, 151-157, 161-179, 183-198, | 666 | 828 |
| | | 201-219, 233-239, 247-252, 268-276, 283-294, 299-309, 319-324 | | |
| EAEC98 | ECs3415 | 7-15, 20-32, 85-97, 102-109, 117-133, 137-161, 176-184, 186-203, 213-225, | 667 | 829 |
| | | 227-251, 258-274, 280-290, 319-325, 335-364, 377-387, 403-410, 412-421, | | |
| | | 436-454, 458-475, 478-504, 512-521, 541-567, 601-609, 614-622, 635-651, | | |
| | | 657-669, 687-694, 702-708, 717-733, 735-741, 766-786, 788-800, 813-818, | | |
| | | 823-834 | | |
| EAEC99 | ECs3515 | 4-38, 49-69, 75-85, 110-115, 127-134, 167-173, 203-211, 240-245, 258-264, | 668 | 830 |
| | | 293-299, 301-316, 348-354, 356-362, 386-391, 405-410, 456-462, 474-483, | | |
| | | 494-499, 511-516, 523-528, 533-538, 549-557, 579-585, 587-593, 607-612, | | |
| | | 618-625, 627-634, 654-660, 664-670, 682-688, 697-702, 729-736, 749-756, | | |
| | | 783-793, 804-812, 817-829, 862-868, 915-920, 944-950, 954-960, 1000-1031, | | |
| | | 1044-1056, 1069-1077, 1079-1084, 1097-1118, 1139-1146, 1152-1158, | | |
| | | 1165-1176, 1181-1186, 1201-1213, 1257-1263, 1268-1276, 1278-1285, | | |
| | | 1354-1360, 1369-1378, 1386-1396, 1439-1446, 1491-1501, 1526-1548, | | |
| | | 1556-1564 | | |
| EAEC100 | ECs3597 | 4-13, 20-34, 47-53, 58-65, 76-82, 89-106, 139-160, 165-182, 191-205 | 669 | 831 |
| EAEC101 | ECs3736 | 20-40, 42-49, 58-67, 71-80, 95-100, 116-122, 131-142, 145-152, 158-173, | 670 | 832 |
| | | 179-186, 196-202, 229-241, 258-270, 289-300, 302-320, 345-351, 370-382, | | |
| | | 391-404, 455-464, 504-514, 516-527 | | |
| EAEC102 | ECs3745 | 5-14, 26-35, 38-45, 54-60, 63-79, 121-127, 137-145, 152-162, 167-173, 175-183, | 671 | 833 |
| | | 191-202, 218-228, 238-263, 278-295, 303-316, 320-335, 337-345, 359-365, | | |
| | | 382-400 | | |
| EAEC103 | ECs3811 | 4-17, 31-38, 46-61, 68-73, 76-97, 128-139, 150-156, 166-172, 174-182, 184-212, | 672 | 834 |
| | | 219-225, 238-245, 249-262 | | |
| EAEC104 | ECs3821 | 4-24, 31-42, 45-54, 59-71, 83-92, 108-115, 123-130, 149-156, 202-208, 224-233 | 673 | 835 |
| EAEC105 | ECs3824 | 4-16, 25-41, 44-52, 60-66, 73-82, 92-101, 108-114, 133-138, 145-155, 177-185, | 674 | 836 |
| | | 194-202 | | |
| EAEC106 | ECs3827 | 4-9, 21-39, 72-78, 82-88, 99-131, 136-143, 151-162, 164-187, 189-204, 208-216, | 675 | 837 |
| | | 223-229, 232-240, 246-256, 269-283, 288-299, 311-321, 328-335 | | |
| EAEC107 | ECs3843 | 26-33, 39-45, 50-62, 79-85, 87-101, 116-131, 142-152, 154-186, 193-199, | 676 | 838 |
| | | 201-216, 221-243, 266-272, 281-297, 324-330, 335-342, 345-355, 375-383, | | |
| | | 407-413 | | |
| EAEC108 | ECs3923 | 4-22, 27-36, 60-69, 90-98, 107-113, 117-123, 127-134, 137-151, 154-161, | 677 | 839 |
| | | 169-178, 185-192, 202-208, 214-223, 230-239, 245-255, 266-275, 307-317, | | |
| | | 323-337, 339-353, 361-379, 385-391, 393-401, 415-422, 424-429, 434-442, | | |
| | | 444-449, 470-480 | | |
| EAEC109 | ECs3951 | 4-22, 29-34, 37-44, 53-80, 98-110, 127-142, 144-156, 158-165 | 678 | 840 |
| EAEC110 | ECs4037 | 4-12, 14-20, 27-34, 39-47, 51-67, 69-81, 89-97, 105-119, 121-133, 140-149, | 679 | 841 |
| | | 151-161 | | |
| EAEC111 | ECs4049 | 17-24, 34-40, 78-85, 227-233, 294-315, 327-335, 345-351, 354-359, 363-368, | 680 | 842 |
| | | 388-403, 405-411, 413-419, 425-434, 462-472, 480-500, 528-536, 542-560, | | |
| | | 566-573, 579-589, 593-606, 614-646, 651-658, 663-669, 686-726, 734-747, | | |
| | | 754-778, 787-806, 809-825, 827-839, 876-887 | | |
| EAEC112 | ECs4079 | 9-29, 35-40, 49-63, 69-76, 110-134, 141-147, 160-169 | 681 | 843 |
| EAEC113 | ECs4091 | 6-31, 33-47, 53-59, 62-78, 93-98, 105-114, 121-130, 136-169, 172-195, 197-208, | 682 | 844 |
| | | 223-228, 236-267, 277-283, 295-307, 309-325, 330-339, 345-352, 358-370, | | |
| | | 379-391, 419-450, 461-508, 510-519, 521-539, 547-575, 578-587, 589-603, | | |
| | | 612-633, 644-657, 666-678, 694-706, 712-717, 728-742, 759-769, 777-784, | | |
| | | 800-806, 820-838, 841-848, 851-856, 870-876, 887-895, 908-914, 923-940, | | |
| | | 942-953, 969-988 | | |
| EAEC115 | ECs4147 | 12-39, 41-50, 68-74, 87-97, 113-136, 141-156, 167-180, 290-196, 204-223, | 683 | 845 |
| | | 229-235, 247-278 | | |
| EAEC116 | ECs4174 | 10-16, 25-53, 64-74 | 684 | 846 |
| EAEC117 | ECs4233 | 5-43, 46-81, 88-96, 137-142, 163-191, 195-203, 210-235, 241-254, 256-276, | 685 | 847 |
| | | 280-288, 292-305, 307-313, 317-333, 335-343, 347-353, 357-363, 372-381, | | |
| | | 384-389, 399-409 | | |
| EAEC118 | ECs4249 | 8-14, 22-32, 35-46, 57-75, 83-91, 100-106, 108-114, 125-131, 133-142, 157-175, | 686 | 848 |
| | | 186-211, 217-235, 246-361, 367-372, 382-394, 396-405, 414-438, 459-471, | | |
| | | 504-510, 513-535, 538-560 | | |
| EAEC119 | ECs4258 | 8-20, 25-30, 46-62, 67-73, 98-103, 105-114, 119-141, 144-153, 168-178, | 687 | 849 |
| | | 181-193, 198-204, 208-227, 236-242, 249-258, 281-288, 291-306, 327-336, | | |
| | | 340-361, 368-380, 389-409, 417-426, 428-435, 442-453, 468-486, 488-496, | | |
| | | 498-509, 511-523, 540-553, 566-579, 587-603, 629-636, 677-682 | | |
| EAEC120 | ECs4337 | 9-25, 41-61, 68-75, 81-102, 106-141, 158-165, 172-191 | 688 | 850 |
| EAEC121 | ECs4346 | 7-38, 43-58, 67-79, 92-99, 103-111, 118-128, 130-139, 152-165, 170-186, | 689 | 851 |
| | | 192-223, 225-251 | | |
| EAEC122 | ECs4347 | 4-16, 21-36, 38-47, 54-64, 92-103, 117-126, 135-155, 157-200, 202-223, | 690 | 852 |
| | | 231-239, 246-262 | | |
| EAEC123 | ECs4410 | 6-38, 44-57, 62-75, 82-96, 104-109, 115-122, 129-136, 147-160, 185-193, | 691 | 853 |
| | | 200-206, 230-245, 248-269, 274-282, 289-298, 306-314, 321-335, 344-362, | | |
| | | 372-377, 385-394, 422-431, 438-447, 479-505, 529-541, 547-558, 564-571, | | |
| | | 573-579, 606-612, 621-632, 638-649, 656-664, 676-683, 695-704, 711-716, | | |
| | | 728-734, 736-742, 776-781, 783-791, 809-816, 850-856, 866-872, 889-898, | | |
| | | 906-912, 919-926, 944-953, 987-992, 1015-1022, 1024-1038, 1066-1072, | | |
| | | 1097-1105, 1113-1119, 1121-1136, 1147-1154 | | |
| EAEC124 | ECs4412 | 5-14, 27-42, 48-67, 71-83, 85-91, 105-112, 114-135, 139-147, 159-165, 169-185, | 692 | 854 |
| | | 188-195, 199-208, 212-221, 231-253, 264-272, 275-282, 290-303, 309-319, | | |
| | | 324-331, 340-358, 380-405, 419-425, 438-444, 450-463, 468-477, 497-514, | | |
| | | 520-533, 549-556, 568-574, 617-626, 637-643, 661-668, 674-684, 705-713, | | |
| | | 718-733, 735-769 | | |
| EAEC125 | ECs4413 | 5-16, 29-53, 63-71, 74-93, 124-132, 140-192, 199-216, 227-258, 260-268, | 693 | 855 |
| | | 272-282, 285-300, 323-331, 353-368, 389-396, 414-421, 429-441, 448-454, | | |
| | | 459-467, 474-493, 501-508, 516-575, 593-612, 631-661, 665-693, 715-724, | | |
| | | 736-751, 754-765, 771-777, 782-791, 809-820, 823-853 | | |
| EAEC126 | ECs4480 | 51-70, 81-95, 103-110, 117-123, 130-136, 142-160, 174-180, 199-207, 268-274, | 694 | 856 |
| | | 280-296, 347-358, 361-369, 390-396, 401-409, 424-430, 442-448, 455-467, | | |
| | | 501-508, 523-533, 553-560 | | |
| EAEC127 | ECs4629 | 4-10, 35-45, 56-92, 108-116, 127-133, 137-146, 156-186, 194-203, 225-234, | 695 | 857 |
| | | 242-251, 272-283, 285-306, 310-315, 322-330, 358-371, 373-379, 389-396 | | |
| EAEC129 | ECs4674 | 4-32, 38-46, 66-83, 88-95, 110-118, 123-141, 169-180, 200-208, 217-225, | 696 | 858 |
| | | 237-245, 247-261, 263-272, 275-282, 291-302, 310-338 345-353, 360-369, | | |
| | | 371-378, 386-394, 398-413, 416-422, 437-448 | | |
| EAEC130 | ECs4761 | 4-11, 18-26, 31-47, 59-68, 74-92, 98-144, 149-158, 173-180, 200-210, 216-223, | 697 | 859 |
| | | 239-250 | | |
| EAEC131 | ECs4860 | 4-10, 29-56, 93-99, 119-124, 133-140, 159-171, 187-195, 200-214, 221-233, | 698 | 860 |
| | | 249-255, 263-271, 285-291, 310-316 | | |
| EAEC161 | ECs4901 | 29-35, 68-85, 92-99, 107-122, 124-135, 138-144, 146-158, 173-205, 208-227, | 699 | 861 |
| | | 232-259, 277-285, 317-324, 326-333 | | |
| EAEC133 | ECs4910 | 9-18, 21-27, 42-49, 58-75, 85-93, 100-106, 108-122, 125-131, 140-150, 155-162, | 700 | 862 |
| | | 165-186, 201-206, 209-214, 220-249, 261-267, 279-289, 292-299, 304-310, | | |
| | | 328-338, 343-355, 370-378, 381-389, 393-400, 411-418, 424-436, 438-449, | | |
| | | 474-496, 524-531, 556-572, 586-592, 606-617, 623-629, 643-657, 659-676, | | |
| | | 696-702, 709-717, 735-755, 763-775, 788-809, 835-843 | | |
| EAEC134 | ECs4914 | 20-32, 52-63, 75-88, 96-101, 116-154, 164-173, 187-199, 202-240, 253-279, | 701 | 863 |
| | | 285-298, 305-318, 324-339 | | |
| EAEC135 | ECs5012 | 4-22, 24-29, 36-43, 63-75, 90-96, 118-128, 137-145, 168-182, 200-210, 212-221, | 702 | 864 |
| | | 242-250, 289-316, 318-323, 327-339, 381-387, 401-411, 424-434, 443-449, | | |
| | | 453-465, 485-498, 500-508, 510-515, 521-528, 538-545, 554-560, 574-606, | | |
| | | 619-627, 645-658, 681-688 | | |
| EAEC136 | ECs5026 | 8-18, 45-50, 52-62, 76-82, 84-107, 109-116, 130-137, 141-150, 152-158, | 703 | 865 |
| | | 164-170, 175-186, 188-196 | | |
| EAEC137 | ECs5061 | 11-19, 24-34, 41-48, 55-63, 68-81, 85-91, 100-106, 111-120, 131-138, 144-161, | 704 | 866 |
| | | 168-176, 192-203, 213-225, 227-234, 236-243, 255-262, 265-274, 282-290, | | |
| | | 296-301, 309-316, 349-359, 368-377, 384-390, 398-412, 417-433, 439-448, | | |
| | | 467-475, 481-486, 501-508, 510-517, 521-532, 538-545 | | |
| EAEC162 | ECs5079 | 4-42, 48-59, 74-88, 92-119, 121-149, 163-180, 185-195, 199-209 | 705 | 867 |
| EAEC138 | ECs5087 | 5-26, 60-76, 104-114, 119-128, 136-141, 156-167, 186-198, 218-237, 260-267, | 706 | 868 |
| | | 275-290, 309-318, 328-335 | | |
| EAEC139 | ECs5147 | 5-17, 23-48, 60-73, 75-82, 98-108, 110-128, 146-160, 168-180, 191-213, | 707 | 869 |
| | | 229-237, 240-252, 269-277, 305-313 | | |
| EAEC140 | ECs5191 | 8-28, 53-62, 70-78, 81-89, 97-115, 125-148, 155-168, 174-186, 196-202, | 708 | 870 |
| | | 207-214, 220-238, 241-256, 258-267, 284-290, 297-306, 312-317, 322-327, | | |
| | | 330-344, 352-358, 367-385, 387-395, 400-414, 422-430, 438-455, 458-466, | | |
| | | 491-507, 539-544, 561-566, 571-577, 598-604, 617-623, 640-647 | | |
| EAEC142 | b1368 | 7-14, 24-32, 56-72, 95-100, 108-114, 123-138, 143-153, 203-221, 224-230, | 709 | 871 |
| | | 260-269, 290-297, 302-308, 321-355, 364-370, 398-427, 434-439, 446-473, | | |
| | | 505-510, 512-518, 536-546, 573-587, 589-595, 629-636, 683-709, 728-734, | | |
| | | 778-786, 795-802, 825-830, 911-934, 944-956, 960-970, 977-985, 987-993, | | |
| | | 1009-1015, 1027-1035, 1047-1052, 1058-1065 | | |
| EAEC144 | b3480 | 4-16, 21-36, 38-47, 54-64, 92-103, 117-126, 135-155, 157-200, 202-223, | 710 | 872 |
| | | 231-239, 246-262 | | |
| EAEC146 | b3689 | 4-10, 35-45, 56-92, 108-116, 127-133, 137-146, 156-186, 194-203, 225-234, | 711 | 873 |
| | | 242-251, 272-283, 285-306, 310-315, 322-330, 358-371, 373-379, 389-396 | | |
| ARF1 | ARF0254 | 4-40, 47-59, 62-75, 81-87, 107-113 | 712 | 874 |
| ARF151 | ARF0600 | 6-13, 21-31, 44-54, 64-70, 77-84 | 713 | 875 |
| ARF2 | ARF0965 | 17-24, 26-41, 50-55 | 714 | 876 |
| ARF24 | ARF1004 | 24-32 | 715 | 877 |
| ARF3 | ARF1396 | 15-28, 36-44 | 716 | 878 |
| ARF4 | ARF1603 | 4-25, 28-34, 37-43, 45-52, 59-69, 85-91, 104-114 | 717 | 879 |
| ARF5 | ARF2885 | 13-39, 51-63, 80-101, 141-149, 165-176, 191-210 | 718 | 880 |
| ARF6 | ARF3364 | 6-19 | 719 | 881 |
| ARF7 | ARF3558 | 4-19, 23-42, 57-66, 98-114, 121-127, 148-155, 164-181, 194-204, 217-222, | 720 | 882 |
| | | 248-258, 266-285, 288-296, 309-329, 331-342, 344-353, 361-378 | | |
| ARF8 | ARF3629 | 4-14, 26-32 | 721 | 883 |
| ARF9 | ARF3673 | 10-18, 29-62, 72-91, 106-120, 147-154, 185-195, 203-210, 220-238, 262-267, | 722 | 884 |
| | | 275-285, 315-365, 376-388, 390-399, 414-423 | | |
| ARF150 | ARF4206 | 8-17, 43-49, 63-70, 79-86, 89-100 | 723 | 885 |
| ARF10 | ARF4334 | 4-19, 21-31, 54-68 | 724 | 886 |
| ARF13 | ARF4425 | 4-10, 26-31 | 725 | 887 |
| ARF14 | ARF4467 | 4-12, 21-30, 37-51 | 726 | 888 |
| ARF15 | ARF4692 | 4-11, 20-46 | 727 | 889 |
| ARF16 | ARF4739 | 4-10, 23-28 | 728 | 890 |
| ARF17 | ARF4851 | 4-28, 32-50 | 729 | 891 |
| ARF18 | ARF5002 | 4-25 | 730 | 892 |
| ARF19 | ARF5020 | 35-53 | 731 | 893 |
| ARF149 | ARF5347 | 14-20, 48-56, 63-68, 79-87 | 732 | 894 |
| ARF143 | ARF-b3374 | 34-40, 50-62 | 733 | 895 |
| ARF145 | ARF-b3577 | 23-34, 59-72 | 734 | 896 |
| CRF1 | CRF0147 | 4-16, 28-39, 62-68, 85-97 | 735 | 897 |
| CRF2 | CRF0173 | 10-20, 23-31, 35-42, 48-62 | 736 | 898 |
| CRF3 | CRF0372 | 4-44, 46-52, 54-64, 70-85 | 737 | 899 |
| CRF4 | CRF1408 | 4-12, 24-40 | 738 | 900 |
| CRF5 | CRF1476 | 10-22, 24-46, 52-57, 74-81 | 739 | 901 |
| CRF148 | CRF1683 | 10-20, 27-40, 48-57 | 740 | 902 |
| CRF6 | CRF1902 | 24-37 | 741 | 903 |
| CRF7 | CRF2012 | 20-29, 39-45, 53-65, 67-85 | 742 | 904 |
| CRF8 | CRF2570 | 6-22, 25-41, 43-66, 74-84, 87-94, 107-113 | 743 | 905 |
| CRF9 | CRF2696 | 4-12, 17-23, 39-62 | 744 | 906 |
| CRF10 | CRF2937 | 4-13, 21-45, 51-70 | 745 | 907 |
| CRF11 | CRF3041 | 15-25, 33-52 | 746 | 908 |
| CRF12 | CRF3160 | 8-19, 44-53, 60-70, 78-85, 97-107 | 747 | 909 |
| CRF14 | CRF3314 | 13-23, 31-40, 59-66, 84-90, 96-110 | 748 | 910 |
| CRF15 | CRF3625 | 4-25, 37-48, 56-71, 83-97, 112-132, 140-150, 152-157 | 749 | 911 |
| CRF16 | CRF3797 | 4-17, 19-26, 41-49, 63-87, 92-99, 113-131 | 750 | 912 |
| CRF17 | CRF3808 | 4-10, 17-23 | 751 | 913 |
| CRF18 | CRF4119 | 4-19, 26-35, 43-50, 61-72 | 752 | 914 |
| CRF19 | CRF4266 | 5-10, 31-38, 42-70, 84-99 | 753 | 915 |
| CRF20 | CRF4320 | 12-26, 48-55 | 754 | 916 |
| CRF21 | CRF4483 | 4-10, 13-63, 69-81, 83-105, 143-150 | 755 | 917 |
| CRF22 | CRF4752 | 4-12, 18-29, 49-68 | 756 | 918 |
| CRF23 | CRF4786 | 19-25, 27-33, 43-84, 86-92, 111-118, 125-136, 138-147, 158-165, 181-192 | 757 | 919 |
| CRF24 | CRF4885 | 20-29, 50-56, 63-85, 89-98, 120-128 | 758 | 920 |
| CRF25 | CRF5063 | 4-11, 41-47 | 759 | 921 |
| CRF27 | CRF5282 | 14-27, 50-62 | 760 | 922 |
| CRF35 | CRF-b2972 | 10-19, 35-41, 43-51 | 761 | 923 |
| CRF37 | CRF-b4332 | 17-40, 47-66, 70-78 | 762 | 924 |

[0338] TABLE 5
Gene distribution analysis for a selected number of antigens in various strains of the
respective bacterial species.

| | | | | Gene | Gene | Gene |
|---|---|---|---|---|---|---|
| Antigenic | Seq ID | | | distribution | distribution | distribution |
| protein | (DNA) | Source* | Homolog** | SF | EAEC | ETEC |
| SepA | 935 | S. flexneri | EAEC | 24/46 | n.d. | n.d. |
| SF2968 | 959 | S. flexneri | EAEC | 25/46 | n.d. | n.d. |
| SF2972 | 960 | S. flexneri | EAEC | 16/46 | n.d. | n.d. |
| pCP0179 | 970 | S. flexneri | EAEC | 46/46 | 7/46 | 23/46 |
| icsB | 997 | S. flexneri | n.d. | 37/46 | n.d. | n.d. |
| ipaA | 998 | S. flexneri | n.d. | 29/46 | n.d. | n.d. |
| ipaB | 999 | S. flexneri | n.d. | 31/46 | n.d. | n.d. |
| ipaC | 1000 | S. flexneri | n.d. | 26/46 | n.d. | n.d. |
| ipaD | 1001 | S. flexneri | n.d. | 32/46 | n.d. | n.d. |
| ipaH14 | 1002 | S. flexneri | n.d. | 46/46 | n.d. | n.d. |
| ipaH45 | 1003 | S. flexneri | n.d. | 46/46 | n.d. | n.d. |
| ipaH78 | 1004 | S. flexneri | n.d. | 38/46 | n.d. | n.d. |
| ipaH98 | 1005 | S. flexneri | n.d. | 45/46 | n.d. | n.d. |
| mxiH | 1006 | S. flexneri | n.d. | 38/46 | n.d. | n.d. |
| SF0267 | 1011 | S. flexneri | n.d. | 36/46 | n.d. | n.d. |
| SF0722 | 1012 | S. flexneri | n.d. | 46/46 | n.d. | n.d. |
| SF1383 | 1018 | S. flexneri | n.d. | 46/46 | n.d. | n.d. |
| SF1880 | 1021 | S. flexneri | n.d. | 46/46 | n.d. | n.d. |
| SF1889 | 1022 | S. flexneri | n.d. | 34/46 | n.d. | n.d. |
| SF1966 | 1023 | S. flexneri | n.d. | 46/46 | n.d. | n.d. |
| SF2610 | 1027 | S. flexneri | n.d. | 45/46 | n.d. | n.d. |
| pCP0254 | 1043 | S. flexneri | n.d. | 46/46 | n.d. | n.d. |
| pCP0262 | 1044 | S. flexneri | n.d. | 46/46 | n.d. | n.d. |
| virG | 1045 | S. flexneri | n.d. | 34/46 | n.d. | n.d. |
| CRF2911 | 1061 | S. flexneri | n.d. | 46/46 | n.d. | n.d. |
| b1368 | 456 | EAEC | n.d. | n.d. | 24/46 | n.d. |
| b2969 | 457 | EAEC | n.d. | n.d. | n.d. | 0/46 |
| b2986 | 458 | EAEC | n.d. | n.d. | n.d. | 45/46 |
| b3480 | 459 | EAEC | n.d. | n.d. | 44/46 | n.d. |
| b3689 | 460 | EAEC | n.d. | n.d. | 44/46 | n.d. |
| ECs0605 | 28 | ETEC | — | n.d. | n.d. | 26/46 |
| ECs0954 | 337 | EAEC | n.d. | n.d. | 45/46 | n.d. |
| ECs1392 | 41 | ETEC | EAEC | n.d. | n.d. | n.d. |
| ECs1638 | 44 | ETEC | SF708, EAEC | 27/46 | 25/46 | 30/46 |
| ECs1646 | 46 | ETEC | SF1886, | 46/46 | 44/46 | 39/46 |
| | | | EAEC | | | |
| ECs1650 | 347 | EAEC | n.d. | n.d. | 44/46 | n.d. |
| ECs2178 | 59 | ETEC | EAEC | 10/746 | 37/46 | 34/46 |
| ECs2662 | 369 | EAEC | n.d. | n.d. | 41/46 | n.d. |
| ECs3843 | 406 | EAEC | n.d. | n.d. | 7/46 | 13/46 |
| ECs5350 | 455 | ETEC | n.d. | n.d. | n.d. | 45/46 |
| EAEC11 | 161 | ETEC | — | n.d. | n.d. | 31/46 |
| EAEC12 | 162 | EAEC | SF2973 | 8/46 | 42/46 | 1/46 |
| EAEC15 | 163 | ETEC | — | n.d. | n.d. | 32/46 |
| EAEC16 | 164 | ETEC | — | n.d. | n.d. | 17/46 |
| EAEC17 | 165 | ETEC | — | n.d. | n.d. | 24/46 |
| EAEC18 | 166 | EAEC | — | n.d. | 13/46 | n.d. |
| EAEC19 | 167 | ETEC | SepA | n.d. | n.d. | 8/46 |
| EAEC20 | 168 | ETEC | — | n.d. | n.d. | 3/46 |
| EAEC21 | 169 | EAEC | — | n.d. | 15/46 | n.d. |
| EAEC23 | 170 | EAEC | — | 8/46 | 38/46 | 36/46 |
| EAEC24 | 171 | EAEC | — | n.d. | 7/46 | n.d. |
| EAEC25 | 172 | EAEC | — | 10/46 | 44/46 | 46/46 |
| EAEC27 | 173 | EAEC | — | n.d. | 15/46 | n.d. |
| EAEC29 | 174 | EAEC | — | n.d. | 14/46 | n.d. |
| EAEC40 | 609 | EAEC | ECs0218 | 6/46 | 39/46 | 36/46 |
| EAEC45 | 614 | EAEC | ECs0336 | 1/46 | 39/46 | 43/46 |
| EAEC47 | 617 | EAEC | Ecs0454 | n.d. | 17/46 | n.d. |
| EAEC48 | 618 | EAEC | Ecs0541 | n.d. | 15/46 | n.d. |
| EAEC49 | 21 | EAEC | ECs0541 | n.d. | 28/46 | n.d. |
| EAEC50 | 619 | EAEC | ECs0548 | n.d. | 16/46 | n.d. |
| EAEC62 | 631 | EAEC | ECs1643 | n.d. | 26/46 | n.d. |
| EAEC120 | 688 | EAEC | ECs4337 | n.d. | 7/46 | n.d. |
| EAEC126 | 694 | EAEC | SF3641, | 46/46 | 35/46 | 33/46 |
| | | | ECs4480 | | | |
| EAEC147 | 176 | EAEC | ECs3739, | 46/46 | 45/46 | 45/46 |
| | | | SF2911 | | | |

[0339] TABLE 6
Immunogenicity of epitopes in mice.

| | Seq ID | Seq ID | | peptide | Peptide | |
|---|---|---|---|---|---|---|
| ORF | DNA | Protein | clone injected | name | ELISA | aa (start-stop) |
| sepA | 935 | 1007 | SGGAS36 | SFOSepA.5 | + | 549-576 |
| | | | | SFOSepA.7 | + | 595-622 |
| SF2968 | 959 | 1031 | SFFAN65 | SFO2968.3 | +++++ | 592-616 |
| SF2972 | 960 | 1032 | SFLAM88 | SFO2972.1 | ++ | 9-22 |
| ECs0336 | 17 | 317 | EALAS19 | ECOA045.1 | +++ | 896-923 |
| ECs0454 | 20 | 320 | EAFBE64 | ECOA047.1 | + | 178-204 |
| | | | | ECOA047.3 | +++ | 222-248 |
| | | | | ECOA047.4 | ++ | 244-269 |
| | | | EAFBJ10 | ECOA047.5 | + | 265-296 |
| ECs0541 | 21 | 321 | EAFAA35 | ECOA049.1 | + | 180-209 |
| | | | | ECOA049.2 | ++ | 205-233 |
| ECS0548 | 22 | 322 | EAFBL63 | ECOA050.1 | +++++ | 242-270 |
| | | | | ECOA050.2 | ++++ | 266-294 |
| ECs0605 | 28 | 328 | ETLAD30 | ECO0605.1 | ++++ | 718-740 |
| ECs1643 | 45 | 345 | EAFAT63 | ECOA062.1 | ++ | 197-229 |
| | | | | ECOA062.3 | ++ | 225-256 |
| ECs2178 | 59 | 359 | ETLAR76 | ECO2178.1 | ++ | 42-61 |
| ECs4337 | 125 | 425 | EALAN11 | ECOA120.1 | + | 34-53 |
| ECs4480 | 131 | 431 | EALAV92 | ECOA126.1 | ++ | 1522-1552 |
| EAEC12 | 162 | 462 | EAFAP47 | ECOA012.1 | + | 415-440 |
| EAEC15 | 163 | 463 | ETLAU84 | ECOA015.1 | + | 32-51 |
| EAEC18 | 166 | 466 | EAFAI53 | ECOA018.1 | + | 342-369 |
| | | | | ECOA018.6 | ++++ | 457-484 |
| EAEC19 | 167 | 467 | ETFAP29 | ECOA019.2 | + | 554-582 |
| | | | | ECOA019.3 | + | 578-606 |
| | | | | ECOA019.4 | ++ | 632-659 |
| EAEC21 | 169 | 469 | EALBF79 | ECOA021.1 | +++ | 12-33 |
| | | | | ECOA021.2 | +++ | 27-48 |
| EAEC24 | 171 | 471 | EAFBN60 | ECOA024.2 | ++++ | 52-81 |
| | | | | ECOA024.3 | ++ | 77-105 |
| | | | | ECOA024.4 | ++ | 101-129 |
| EAEC25 | 172 | 472 | EAFBG06 | ECOA025.3 | + | 76-102 |
| EAEC27 | 173 | 473 | EALAX08 | ECOA027.1 | + | 48-77 |
| EAEC29 | 174 | 474 | EALAU94 | ECOA029.1 | + | 6-35 |
| b1368 | 156 | 456 | EAFAF23 | ECOA142.2 | + | 189-218 |
| | | | | ECOA142.3 | ++++ | 214-244 |
| b3480 | 159 | 459 | EALAX23 | ECOA144.1 | +++++ | 122-149 |
| b3689 | 160 | 460 | EALAV46 | ECOA146.1 | ++++ | 106-136 |
| EAEC160 | 177 | 477 | EALAR59 | ECOA160.2 | +++ | 204-224 |
| ECs0014 | 1 | 301 | EAFAA20 | ECOA032.3 | ++++ | 273-297 |
| ECs0041 | 2 | 302 | ETLAE30 | ECO0041.1 | ++++ | 70-88 |
| ECs0063 | 3 | 303 | ETLAT94 | ECO0063.1 | + | 134-147 |
| ECs0067 | 4 | 304 | EALAV72 | ECOA033.1 | ++ | 290-317 |
| | | | EALAY91 | ECOA033.2 | + | 367-388 |
| ECs0089 | 5 | 305 | EALAU75 | ECOA034.1 | +++ | 240-265 |
| ECs0152 | 6 | 306 | EALAD04 | ECOA035.1 | +++ | 796-824 |
| ECs0155 | 8 | 308 | EAFAQ23 | ECOA037.3 | +++ | 83-110 |
| | | | | ECOA037.4 | +++ | 106-133 |
| ECs0156 | 9 | 309 | EALAA33 | ECOA038.1 | +++++ | 120-148 |
| ECs0174 | 10 | 310 | EALAO18 | ECOA039.1 | +++ | 71-106 |
| ECs0314 | 12 | 312 | EALAO52 | ECOA041.1 | + | 278-305 |
| ECs0315 | 13 | 313 | EALAW09 | ECOA042.1 | ++++ | 115-137 |
| ECs0321 | 15 | 315 | ETLAF25 | ECO0321.1 | ++++ | 378-400 |
| ECs0322 | 16 | 316 | EALAE88 | ECOA044.1 | + | 111-137 |
| ECs0345 | 18 | 318 | ETLAD78 | ECO0345.1 | +++ | 3-19 |
| ECs0557 | 23 | 323 | ETLAD28 | ECO0557.1 | +++++ | 103-119 |
| ECs0600 | 26 | 326 | EAFBH15 | ECOA051.1 | ++ | 89-116 |
| | | | | ECOA051.2 | ++ | 112-139 |
| | | | | ECOA051.3 | +++++ | 135-162 |

[0340] Table 7: Peptide ELISA with Peptides Derived from Enteric Pathogens.

TABLE 7A

| Peptide | Sum | From aa | To aa | SeqID |
|---|---|---|---|---|
| ECO2330.1 | 2 | 259 | 268 | 390 |
| ECA2816.1 | 11 | 2 | 19 | 501 |
| ECAA001.1 | 18 | 83 | 114 | 488 |
| ECAA003.1 | 11 | 15 | 33 | 496 |
| ECAA004.1 | 17 | 52 | 84 | 498 |
| ECAA004.2 | 16 | 70 | 93 | 498 |
| ECAA005.1 | 22 | 28 | 54 | 502 |
| ECAA010.1 | 16 | 34 | 66 | 514 |
| ECAA149.1 | 6 | 4 | 32 | 528 |
| ECAA149.2 | 15 | 28 | 56 | 528 |
| ECAA150.1 | 14 | 21 | 47 | 513 |
| ECAA151.1 | 13 | 32 | 57 | 490 |
| ECC0451.1 | 3 | 96 | 115 | 542 |
| ECC0464.1 | 12 | 161 | 176 | 543 |
| ECC2336.1 | 13 | 58 | 89 | 557 |
| ECC2336.2 | 18 | 85 | 116 | 557 |
| ECC2336.3 | 22 | 112 | 143 | 557 |
| ECC2633.1 | 7 | 97 | 115 | 559 |
| ECC3088.1 | 19 | 84 | 106 | 565 |
| ECC3936.1 | 3 | 3 | 19 | 572 |
| ECC4317.1 | 5 | 38 | 63 | 575 |
| ECC4393.1 | 15 | 33 | 64 | 580 |
| ECC4393.2 | 15 | 60 | 91 | 580 |
| ECC4393.3 | 22 | 87 | 119 | 580 |
| ECCA008.1 | 3 | 93 | 123 | 558 |
| ECCA010.1 | 5 | 16 | 34 | 563 |
| ECCA013.1 | 1 | 61 | 92 | 593 |
| ECCA013.2 | 3 | 88 | 120 | 593 |
| ECCA014.1 | 2 | 48 | 76 | 568 |
| ECCA014.2 | 1 | 72 | 100 | 568 |
| ECCA014.3 | 0 | 96 | 124 | 568 |
| ECCA014.4 | 3 | 120 | 147 | 568 |
| ECCA015.1 | 2 | 111 | 146 | 569 |
| ECCA016.1 | 2 | 26 | 50 | 570 |
| ECCA016.2 | 8 | 46 | 71 | 570 |
| ECCA016.3 | 9 | 67 | 92 | 570 |
| ECCA018.1 | 6 | 11 | 46 | 573 |
| ECCA019.1 | 1 | 92 | 127 | 574 |
| ECCA021.1 | 5 | 46 | 78 | 582 |
| ECCA021.2 | 2 | 74 | 106 | 582 |
| ECCA021.3 | 3 | 102 | 133 | 582 |
| ECCA023.1 | 5 | 94 | 124 | 584 |
| ECCA024.1 | 3 | 2 | 29 | 585 |
| ECCA031.1 | 5 | 10 | 43 | 597 |
| ECCA034.1 | 1 | 24 | 51 | 600 |
| ECCA034.2 | 9 | 47 | 74 | 600 |
| ECCA034.3 | 0 | 70 | 98 | 600 |
| ECCA148.1 | 5 | 15 | 42 | 551 |
| ECCA148.2 | 3 | 38 | 58 | 551 |
| ECO2330.1 | 1 | 259 | 268 | 390 |
| ECCA032.1 | 20 | 66 | 94 | 598 |
| ECCT028.1 | 2 | 17 | 43 | 594 |
| ECO2882.1 | 5 | 178 | 198 | 375 |
| ECO3221.1 | 7 | 441 | 473 | 385 |
| ECO3221.2 | 5 | 469 | 501 | 385 |
| ECO3221.3 | 4 | 497 | 531 | 385 |
| ECO3264.1 | 3 | 105 | 127 | 387 |
| ECO3265.1 | 8 | 8 | 35 | 388 |
| ECO3265.2 | 4 | 36 | 63 | 388 |
| ECO3265.3 | 3 | 64 | 91 | 388 |
| ECO3378.1 | 3 | 216 | 231 | 391 |
| ECO3431.1 | 22 | 203 | 222 | 395 |
| ECO3832.1 | 9 | 180 | 210 | 404 |
| ECO3832.2 | 11 | 206 | 236 | 404 |
| ECO3832.3 | 1 | 232 | 261 | 404 |
| ECO3836.1 | 1 | 6 | 28 | 405 |
| ECO3937.1 | 1 | 224 | 238 | 408 |
| ECO4041.1 | 4 | 274 | 291 | 411 |
| ECO4051.1 | 2 | 134 | 148 | 413 |
| ECO4061.1 | 5 | 133 | 153 | 414 |
| ECO4084.1 | 0 | 258 | 284 | 416 |
| ECO4147.1 | 5 | 8 | 33 | 419 |
| ECO4147.2 | 6 | 28 | 53 | 419 |
| ECO4147.3 | 0 | 49 | 74 | 419 |
| ECO4198.1 | 2 | 103 | 127 | 420 |
| ECO4198.2 | 4 | 123 | 147 | 420 |
| ECO4198.3 | 1 | 143 | 166 | 420 |
| ECO4198.4 | 3 | 162 | 185 | 420 |
| ECO4216.1 | 1 | 179 | 206 | 421 |
| ECO4691.1 | 6 | 15 | 27 | 434 |
| ECO4725.1 | 2 | 240 | 261 | 435 |
| ECO4762.1 | 2 | 386 | 402 | 437 |
| ECO4784.1 | 15 | 57 | 74 | 438 |
| ECO5091.1 | 1 | 343 | 375 | 448 |
| ECO5091.2 | 9 | 371 | 403 | 448 |
| ECO5091.3 | 0 | 399 | 432 | 448 |
| ECO5153.1 | 3 | 369 | 390 | 450 |
| ECO5218.1 | 1 | 276 | 292 | 452 |
| ECO5276.1 | 3 | 196 | 227 | 453 |
| ECO5276.2 | 3 | 223 | 254 | 453 |
| ECO5276.3 | 0 | 250 | 280 | 453 |
| ECO5276.4 | 0 | 284 | 311 | 453 |
| ECO5276.5 | 1 | 307 | 334 | 453 |
| ECO5276.6 | 0 | 330 | 356 | 453 |
| ECO5276.7 | 1 | 352 | 378 | 453 |
| ECO5315.1 | 0 | 253 | 271 | 454 |
| ECO5350.1 | 2 | 419 | 432 | 455 |
| ECOA079.1 | 1 | 24 | 51 | 370 |
| ECO2330.1 | 3 | 259 | 268 | 390 |
| ECOA080.1 | 13 | 23 | 48 | 371 |
| ECOA081.1 | 16 | 179 | 198 | 372 |
| ECOA082.1 | 17 | 431 | 455 | 373 |
| ECOA083.1 | 14 | 319 | 349 | 374 |
| ECOA083.2 | 20 | 345 | 374 | 374 |
| ECOA083.3 | 11 | 370 | 399 | 374 |
| ECOA084.1 | 13 | 455 | 479 | 376 |
| ECOA084.2 | 3 | 475 | 498 | 376 |
| ECOA085.1 | 16 | 653 | 675 | 377 |
| ECOA086.1 | 13 | 75 | 108 | 378 |
| ECOA087.1 | 10 | 1362 | 1388 | 379 |
| ECOA088.1 | 3 | 8 | 36 | 380 |
| ECOA088.2 | 15 | 32 | 60 | 380 |
| ECOA088.3 | 19 | 56 | 84 | 380 |
| ECOA089.1 | 14 | 1 | 25 | 381 |
| ECOA090.1 | 7 | 65 | 88 | 382 |
| ECOA091.1 | 6 | 102 | 134 | 383 |
| ECOA092.1 | 7 | 104 | 131 | 384 |
| ECOA093.1 | 2 | 206 | 231 | 386 |
| ECOA094.1 | 4 | 5 | 23 | 389 |
| ECOA095.1 | 1 | 510 | 536 | 390 |
| ECOA095.2 | 3 | 546 | 577 | 390 |
| ECOA096.1 | 4 | 300 | 326 | 392 |
| ECOA096.2 | 1 | 1320 | 1353 | 392 |
| ECOA097.1 | 9 | 205 | 240 | 393 |
| ECOA098.1 | 1 | 971 | 1003 | 394 |
| ECOA099.1 | 2 | 455 | 483 | 396 |
| ECOA099.2 | 18 | 1232 | 1263 | 396 |
| ECOA100.1 | 0 | 12 | 40 | 397 |
| ECOA101.1 | 2 | 3 | 32 | 398 |
| ECOA102.1 | 2 | 68 | 103 | 399 |
| ECOA103.1 | 1 | 188 | 222 | 400 |
| ECOA104.1 | 11 | 25 | 55 | 401 |
| ECOA105.1 | 3 | 98 | 130 | 402 |
| ECOA106.1 | 19 | 211 | 236 | 403 |
| ECOA107.1 | 1 | 362 | 392 | 406 |
| ECOA108.1 | 2 | 365 | 389 | 407 |
| ECOA109.1 | 2 | 60 | 81 | 409 |
| ECOA110.1 | 5 | 69 | 104 | 410 |
| ECOA111.1 | 3 | 124 | 152 | 412 |
| ECOA111.2 | 1 | 148 | 177 | 412 |
| ECOA112.1 | 3 | 74 | 102 | 415 |
| ECOA113.1 | 5 | 1019 | 1051 | 417 |
| ECOA113.2 | 0 | 1162 | 1190 | 417 |
| ECOA113.3 | 1 | 1186 | 1214 | 417 |
| ECOA113.4 | 1 | 1210 | 1238 | 417 |
| ECOA113.5 | 3 | 1234 | 1261 | 417 |
| ECOA118.1 | 11 | 692 | 724 | 423 |
| ECO2330.1 | 2 | 259 | 268 | 390 |
| ECOA116.1 | 13 | 15 | 41 | 418 |
| ECOA116.2 | 9 | 37 | 62 | 418 |
| ECOA116.3 | 16 | 58 | 83 | 418 |
| ECOA117.1 | 10 | 59 | 87 | 422 |
| ECOA117.2 | 6 | 83 | 110 | 422 |
| ECOA117.3 | 14 | 111 | 140 | 422 |
| ECOA119.1 | 15 | 174 | 206 | 424 |
| ECOA121.1 | 4 | 96 | 119 | 426 |
| ECOA122.1 | 7 | 128 | 152 | 427 |
| ECOA123.1 | 6 | 104 | 130 | 428 |
| ECOA124.1 | 10 | 542 | 568 | 429 |
| ECOA125.1 | 10 | 107 | 129 | 430 |
| ECOA127.1 | 11 | 112 | 137 | 432 |
| ECOA129.1 | 16 | 52 | 80 | 433 |
| ECOA130.1 | 6 | 19 | 45 | 436 |
| ECOA131.1 | 0 | 1113 | 1144 | 441 |
| ECOA133.1 | 7 | 94 | 119 | 439 |
| ECOA133.2 | 0 | 110 | 135 | 439 |
| ECOA133.3 | 2 | 136 | 160 | 439 |
| ECOA134.1 | 0 | 89 | 115 | 442 |
| ECOA135.1 | 3 | 474 | 496 | 443 |
| ECOA135.2 | 1 | 492 | 515 | 443 |
| ECOA136.1 | 3 | 14 | 40 | 444 |
| ECOA137.1 | 0 | 422 | 448 | 445 |
| ECOA138.1 | 1 | 294 | 333 | 447 |
| ECOA139.1 | 6 | 113 | 140 | 449 |
| ECOA140.1 | 0 | 8 | 36 | 451 |
| ECOA140.2 | 1 | 32 | 61 | 451 |
| ECOA140.3 | 0 | 57 | 86 | 451 |
| ECOA161.1 | 1 | 1 | 28 | 440 |
| ECOA161.2 | 2 | 120 | 147 | 440 |
| ECOA161.3 | 0 | 143 | 170 | 440 |
| ECOA162.1 | 4 | −14 | 11 | 446 |

[0341] TABLE 7B

| Peptide | Sum | From aa | To aa | SeqID |
|---|---|---|---|---|
| SFO0179.1 | 20 | 96 | 124 | 1042 |
| SF2968.1 | 16 | 550 | 575 | 1031 |
| SF2968.2 | 18 | 571 | 596 | 1031 |
| SF2968.3 | 17 | 592 | 616 | 1031 |
| SFA0504.1 | 19 | 144 | 170 | 1046 |
| SFA1280.1 | 2 | 79 | 100 | 1048 |
| SFA3121.1 | 20 | 73 | 96 | 1050 |
| SFA3760.1 | 20 | 21 | 43 | 1051 |
| SFA4075.1 | 17 | 18 | 42 | 1052 |
| SFA4262.1 | 21 | 16 | 50 | 1053 |
| SFC0109.1 | 13 | 7 | 25 | 1055 |
| SFC0548.1 | 19 | 8 | 44 | 1056 |
| SFC0598.1 | 22 | 22 | 51 | 1057 |
| SFC2403.1 | 17 | 2 | 25 | 1059 |
| SFC2748.1 | 17 | 9 | 44 | 1060 |
| SFC2911.1 | 6 | 6 | 34 | 1061 |
| SFC2911.2 | 20 | 30 | 58 | 1061 |
| SFC2911.3 | 12 | 54 | 82 | 1061 |
| SFC2911.4 | 9 | 78 | 105 | 1061 |
| SFC3470.1 | 12 | 9 | 32 | 1062 |
| SFC3528.1 | 11 | 23 | 46 | 1063 |
| SFC3528.2 | 6 | 42 | 65 | 1063 |
| SFC3798.1 | 9 | 1 | 25 | 1064 |
| SFC3843.1 | 20 | 17 | 43 | 1065 |
| SFC4125.1 | 0 | 11 | 38 | 1067 |
| SFO0132.1 | 11 | 44 | 72 | 1009 |
| SFO0132.2 | 1 | 68 | 95 | 1009 |
| SFO0132.3 | 15 | 91 | 118 | 1009 |
| SFO0254.1 | 8 | 163 | 187 | 1043 |
| SFO0267.1 | 7 | 586 | 612 | 1011 |
| SFO0722.1 | 17 | 259 | 284 | 1012 |
| SFO0722.2 | 2 | 283 | 313 | 1012 |
| SFO0722.3 | 3 | 309 | 339 | 1012 |
| SFO0722.4 | 1 | 335 | 365 | 1012 |
| SFO0986.1 | 8 | 311 | 333 | 1016 |
| SFO1383.1 | 16 | 245 | 269 | 1018 |
| SFO1383.2 | 1 | 474 | 504 | 1018 |
| SFO1383.3 | 4 | 500 | 530 | 1018 |
| SFO1383.4 | 1 | 526 | 555 | 1018 |
| SFO1880.1 | 0 | 270 | 302 | 1021 |
| SFO1880.2 | 0 | 298 | 330 | 1021 |
| SFO1880.3 | 3 | 326 | 358 | 1021 |
| SFO1966.1 | 0 | 58 | 86 | 1023 |
| SFO1966.2 | 0 | 82 | 109 | 1023 |
| SFO1966.3 | 0 | 105 | 133 | 1023 |
| SFO1966.4 | 1 | 325 | 353 | 1023 |
| SFO1966.5 | 5 | 349 | 378 | 1023 |
| SFO1966.6 | 0 | 374 | 403 | 1023 |
| SFO2972.1 | 0 | 9 | 33 | 1032 |
| SFO0179.1 | 21 | 96 | 124 | 1042 |
| SFO1889.1 | 21 | 447 | 475 | 1022 |
| SFO1889.2 | 5 | 471 | 498 | 1022 |
| SFO1889.3 | 14 | 494 | 521 | 1022 |
| SFO2610.1 | 16 | 285 | 316 | 1027 |
| SFO2610.2 | 10 | 312 | 343 | 1027 |
| SFO2610.3 | 18 | 339 | 371 | 1027 |
| SFO2610.4 | 3 | 367 | 399 | 1027 |
| SFO2610.5 | 12 | 515 | 541 | 1027 |
| SFO2610.6 | 3 | 537 | 564 | 1027 |
| SFO2610.7 | 4 | 560 | 586 | 1027 |
| SFOIcsB.1 | 18 | 149 | 175 | 997 |
| SFOIcsB.2 | 3 | 171 | 197 | 997 |
| SFOIcsB.3 | 8 | 193 | 217 | 997 |
| SFOIpaA.1 | 9 | 43 | 73 | 998 |
| SFOIpaA.2 | 4 | 69 | 99 | 998 |
| SFOIpaA.3 | 4 | 95 | 124 | 998 |
| SFOIpaA.4 | 12 | 163 | 189 | 998 |
| SFOIpaA.5 | 4 | 185 | 210 | 998 |
| SFOIpaA.6 | 0 | 206 | 231 | 998 |
| SFOIpaA.7 | 14 | 227 | 252 | 998 |
| SFOIpaA.8 | 7 | 248 | 273 | 998 |
| SFOIpaA.9 | 17 | 269 | 294 | 998 |
| SFOIpaA.10 | 13 | 313 | 340 | 998 |
| SFOIpaA.11 | 7 | 336 | 362 | 998 |
| SFOIpaA.12 | 8 | 358 | 384 | 998 |
| SFOIpaA.13 | 1 | 456 | 481 | 998 |
| SFOIpaA.14 | 0 | 477 | 502 | 998 |
| SFOIpaA.15 | 4 | 498 | 523 | 998 |
| SFOIpaB.1 | 17 | 136 | 163 | 999 |
| SFOIpaB.2 | 18 | 159 | 186 | 999 |
| SFOIcsB.3 | 8 | 193 | 217 | 999 |
| SFOIpaB.4 | 0 | 253 | 279 | 999 |
| SFOIpaB.5 | 0 | 275 | 301 | 999 |
| SFOIpaB.6 | 10 | 447 | 474 | 999 |
| SFOIpaB.7 | 18 | 470 | 496 | 999 |
| SFOIpaB.8 | 6 | 492 | 518 | 999 |
| SFOIpaB.9 | 16 | 519 | 547 | 999 |
| SFOIpaB.10 | 3 | 543 | 572 | 999 |
| SFOIpaC.1 | 17 | 31 | 58 | 1000 |
| SFOIpaC.2 | 5 | 54 | 80 | 1000 |
| SFOIpaC.3 | 19 | 76 | 102 | 1000 |
| SFOIpaC.4 | 1 | 166 | 196 | 1000 |
| SFOIpaC.5 | 9 | 222 | 246 | 1000 |
| SFOIpaC.6 | 17 | 242 | 266 | 1000 |
| SFOIpaC.7 | 12 | 284 | 310 | 1000 |
| SFOIpaC.8 | 18 | 306 | 332 | 1000 |
| SFOIpaC.9 | 2 | 328 | 354 | 1000 |
| SFO0179.1 | 13 | 96 | 124 | 1042 |
| SFOIpaD.1 | 7 | 35 | 58 | 1001 |
| SFOIpaD.2 | 8 | 54 | 77 | 1001 |
| SFOIpaD.3 | 8 | 73 | 96 | 1001 |
| SFOIpaH14.1 | 4 | 200 | 229 | 1002 |
| SFOIpaH14.2 | 13 | 225 | 253 | 1002 |
| SFOIpaH14.3 | 20 | 249 | 277 | 1002 |
| SFOIpaH14.4 | 10 | 495 | 522 | 1002 |
| SFOIpaH14.5 | 7 | 518 | 544 | 1002 |
| SFOIpaH14.6 | 6 | 540 | 566 | 1002 |
| SFOIpaH45.1 | 11 | 238 | 267 | 1003 |
| SFOIpaH45.2 | 18 | 268 | 300 | 1003 |
| SFOIpaH45.3 | 11 | 301 | 330 | 1003 |
| SFOIpaH78.1 | 11 | 6 | 36 | 1004 |
| SFOIpaH78.2 | 8 | 32 | 62 | 1004 |
| SFOIpaH78.3 | 7 | 58 | 87 | 1004 |
| SFOIpaH78.4 | 7 | 210 | 237 | 1004 |
| SFOIpaH78.5 | 16 | 233 | 260 | 1004 |
| SFOIpaH78.6 | 1 | 256 | 282 | 1004 |
| SFOIpaH78.7 | 1 | 496 | 522 | 1004 |
| SFOIpaH78.8 | 6 | 518 | 543 | 1004 |
| SFOIpaH78.9 | 0 | 539 | 564 | 1004 |
| SFOIpaH98.1 | 5 | 26 | 53 | 1005 |
| SFOIpaH98.10 | 4 | 468 | 501 | 1005 |
| SFOIpaH98.11 | 9 | 497 | 530 | 1005 |
| SFOIpaH98.2 | 4 | 49 | 76 | 1005 |
| SFOIpaH98.3 | 6 | 72 | 98 | 1005 |
| SFOIpaH98.4 | 14 | 235 | 268 | 1005 |
| SFOIpaH98.5 | 7 | 253 | 283 | 1005 |
| SFOIpaH98.6 | 4 | 279 | 309 | 1005 |
| SFOIpaH98.7 | 0 | 305 | 334 | 1005 |
| SFOIpaH98.8 | 3 | 425 | 455 | 1005 |
| SFOIpaH98.9 | 2 | 439 | 472 | 1005 |
| SFOMxiH.1 | 0 | 7 | 40 | 1006 |
| SFOMxiH.2 | 0 | 36 | 69 | 1006 |
| SFOVirG.1 | 2 | 11 | 38 | 1045 |
| SFOVirG.2 | 3 | 34 | 61 | 1045 |
| SFOVirG.3 | 13 | 57 | 84 | 1045 |
| SFOVirG.4 | 11 | 126 | 153 | 1045 |
| SFOVirG.5 | 3 | 149 | 176 | 1045 |
| SFOVirG.6 | 1 | 172 | 198 | 1045 |
| SFOVirG.7 | 10 | 265 | 290 | 1045 |
| SFOVirG.8 | 0 | 286 | 311 | 1045 |
| SFOVirG.9 | 0 | 307 | 331 | 1045 |

[0342] TABLE 7C

| Peptide | Sum | From aa | To aa | SeqID |
|---|---|---|---|---|
| ECOA042.1 | 1 | 115 | 137 | 313 |
| CJA0021.1 | 20 | 11 | 35 | 1307 |
| CJA0791.1 | 14 | 1 | 25 | 1312 |
| CJA1045.1 | 17 | 8 | 32 | 1313 |
| CJA1410.1 | 15 | 5 | 29 | 1317 |
| CJA1454.1 | 13 | 10 | 34 | 1318 |
| CJC0036.1 | 12 | 82 | 106 | 1320 |
| CJC0037.1 | 10 | 3 | 27 | 1321 |
| CJC0174.1 | 20 | 9 | 33 | 1322 |
| CJC0337.1 | 10 | 1 | 25 | 1323 |
| CJC0412.1 | 17 | 16 | 40 | 1324 |
| CJC0442.1 | 6 | 4 | 35 | 1325 |
| CJC0442.2 | 4 | 31 | 61 | 1325 |
| CJC0631.1 | 14 | 67 | 91 | 1326 |
| CJC0999.1 | 7 | 25 | 52 | 1327 |
| CJC1059.1 | 4 | 20 | 44 | 1329 |
| CJC1123.1 | 8 | 1 | 25 | 1330 |
| CJC1246.1 | 0 | 5 | 32 | 1331 |
| CJC1246.2 | 3 | 28 | 54 | 1331 |
| CJC1257.1 | 3 | 14 | 38 | 1332 |
| CJC1287.1 | 3 | 23 | 47 | 1333 |
| CJC1502.1 | 7 | 8 | 32 | 1334 |
| CJC1567.1 | 1 | 18 | 42 | 1335 |
| CJC1582.1 | 8 | 3 | 27 | 1336 |
| CJO0005.1 | 5 | 181 | 203 | 1203 |
| CJO0007.1 | 2 | 450 | 474 | 1204 |
| CJO0029.1 | 4 | 200 | 224 | 1205 |
| CJO0029.2 | 1 | 220 | 245 | 1205 |
| CJO0029.3 | 0 | 241 | 266 | 1205 |
| CJO0037.1 | 0 | 50 | 79 | 1206 |
| CJO0037.2 | 1 | 75 | 104 | 1206 |
| CJO0079.1 | 4 | 195 | 219 | 1207 |
| CJO0093.1 | 2 | 26 | 53 | 1208 |
| CJO0093.2 | 0 | 49 | 77 | 1208 |
| CJO0113.1 | 1 | 107 | 136 | 1209 |
| CJO0113.2 | 2 | 132 | 162 | 1209 |
| CJO0134.1 | 1 | 197 | 221 | 1210 |
| CJO0143.1 | 0 | 10 | 34 | 1211 |
| CJO0158.1 | 0 | 48 | 80 | 1212 |
| CJO0158.2 | 0 | 76 | 107 | 1212 |
| CJO0178.1 | 0 | 159 | 191 | 1213 |
| CJO0178.2 | 0 | 187 | 218 | 1213 |
| CJO0178.3 | 0 | 434 | 464 | 1213 |
| CJO0178.4 | 0 | 460 | 489 | 1213 |
| CJO0181.1 | 0 | 66 | 90 | 1214 |
| CJO0264.1 | 0 | 51 | 75 | 1215 |
| CJO0264.2 | 1 | 666 | 690 | 1215 |
| CJO0281.1 | 1 | 99 | 123 | 1216 |
| CJO0285.1 | 2 | 251 | 275 | 1217 |
| ECOA042.1 | 5 | 115 | 137 | 313 |
| CJO0297.1 | 8 | 102 | 129 | 1218 |
| CJO0297.2 | 5 | 125 | 151 | 1218 |
| CJO0396.1 | 13 | 30 | 54 | 1219 |
| CJO0406.1 | 4 | 138 | 162 | 1220 |
| CJO0415.1 | 5 | 79 | 103 | 1221 |
| CJO0432.1 | 7 | 101 | 125 | 1222 |
| CJO0448.1 | 3 | 126 | 154 | 1223 |
| CJO0448.2 | 0 | 150 | 178 | 1223 |
| CJO0448.3 | 2 | 174 | 202 | 223 |
| C100505.1 | 6 | 322 | 346 | 1224 |
| CJO0543.1 | 6 | 418 | 442 | 1225 |
| CJO0548.1 | 5 | 126 | 156 | 1226 |
| CJO0548.2 | 1 | 152 | 182 | 1226 |
| CJO0548.3 | 4 | 178 | 208 | 1226 |
| CJO0548.4 | 1 | 436 | 465 | 1226 |
| C100548.5 | 0 | 461 | 489 | 1226 |
| CJO0548.6 | 0 | 485 | 513 | 1226 |
| CJO0596.1 | 0 | 42 | 75 | 1227 |
| CJO0596.2 | 3 | 71 | 104 | 1227 |
| CJO0596.3 | 0 | 134 | 161 | 1227 |
| CJO0596.4 | 0 | 157 | 184 | 1227 |
| CJO0596.5 | 0 | 181 | 209 | 1227 |
| CJO0596.6 | 1 | 205 | 233 | 1227 |
| CJO0599.1 | 1 | 131 | 155 | 1228 |
| CJO0599.2 | 0 | 262 | 286 | 1228 |
| CJO0613.1 | 3 | 43 | 69 | 1229 |
| CJO0613.2 | 0 | 65 | 90 | 1229 |
| CJO0631.1 | 2 | 468 | 492 | 1230 |
| CJO0642.1 | 12 | 90 | 115 | 1231 |
| CJO0642.2 | 0 | 111 | 135 | 1231 |
| CJO0642.3 | 0 | 131 | 155 | 1231 |
| CJO0642.4 | 0 | 151 | 175 | 1231 |
| CJO0652.1 | 0 | 495 | 522 | 1232 |
| CJO0652.2 | 2 | 518 | 545 | 1232 |
| CJO0683.1 | 0 | 45 | 72 | 1233 |
| CJO0683.2 | 0 | 68 | 95 | 1233 |
| CJO0687.1 | 2 | 94 | 121 | 1234 |
| CJO0687.2 | 0 | 117 | 144 | 1234 |
| CJO0689.1 | 2 | 8 | 32 | 1235 |
| CJO0689.2 | 0 | 337 | 361 | 1235 |
| CJO0690.1 | 0 | 943 | 973 | 1236 |
| CJO0690.2 | 0 | 969 | 1000 | 1236 |
| CJO0692.1 | 0 | 191 | 215 | 1237 |
| CJO0696.1 | 0 | 70 | 97 | 1238 |
| CJO0696.2 | 0 | 93 | 120 | 1238 |
| CJO0718.1 | 1 | 800 | 824 | 1242 |
| CJO0718.2 | 1 | 820 | 844 | 1242 |
| CJO0718.3 | 2 | 840 | 864 | 1242 |
| ECOA042.1 | 4 | 115 | 137 | 313 |
| CJO0709.1 | 3 | 341 | 363 | 1241 |
| CJO0709.2 | 1 | 359 | 381 | 1241 |
| CJO0709.3 | 9 | 376 | 402 | 1241 |
| CJO0709.4 | 13 | 398 | 424 | 1241 |
| CJO0709.5 | 9 | 420 | 445 | 1241 |
| CJO0720.1 | 7 | 186 | 216 | 1243 |
| CJO0723.1 | 10 | 103 | 127 | 1244 |
| CJO0737.1 | 6 | 19 | 50 | 1245 |
| CJO0737.2 | 3 | 46 | 77 | 1245 |
| CJO0753.1 | 19 | 80 | 107 | 1246 |
| CJO0753.2 | 4 | 103 | 129 | 1246 |
| CJO0753.3 | 1 | 125 | 151 | 1246 |
| CJO0755.1 | 2 | 406 | 430 | 1247 |
| CJO0775.1 | 2 | 795 | 827 | 1248 |
| CJO0775.2 | 3 | 823 | 855 | 1248 |
| CJO0802.1 | 3 | 404 | 428 | 1249 |
| CJO0814.1 | 3 | 66 | 90 | 1250 |
| CJO0814.2 | 1 | 86 | 110 | 1250 |
| CJO0814.3 | 0 | 106 | 130 | 1250 |
| CJO0832 | 17 | 107 | 131 | 1251 |
| CJO0849 | 4 | 524 | 548 | 1252 |
| CJO0887.1 | 3 | 193 | 217 | 1253 |
| CJO0887.2 | 1 | 293 | 323 | 1253 |
| CJO0887.3 | 0 | 319 | 349 | 1253 |
| CJO0887.4 | 0 | 345 | 375 | 1253 |
| CJO0887.5 | 0 | 371 | 400 | 1253 |
| CJO0942.1 | 2 | 481 | 505 | 1254 |
| CJO0958.1 | 7 | 33 | 58 | 1255 |
| CJO0958.2 | 0 | 54 | 78 | 1255 |
| CJO1013.1 | 1 | 281 | 308 | 1256 |
| CJO1013.2 | 3 | 304 | 331 | 1256 |
| CJO1013.3 | 1 | 327 | 354 | 1256 |
| CJO1031.1 | 2 | 321 | 352 | 1257 |
| CJO1032.1 | 2 | 174 | 198 | 1258 |
| CJO1033.1 | 0 | 248 | 273 | 1259 |
| CJO1033.2 | 3 | 269 | 293 | 1259 |
| CJO1033.3 | 0 | 289 | 313 | 1259 |
| CJO1048.1 | 3 | 249 | 281 | 1260 |
| CJO1048.2 | 4 | 277 | 310 | 1260 |
| CJO1061.1 | 2 | 31 | 55 | 1261 |
| CJO1073.1 | 2 | 415 | 439 | 1262 |
| CJO1073.2 | 8 | 540 | 566 | 1262 |
| CJO1073.3 | 8 | 562 | 589 | 1262 |
| CJO1076.1 | 0 | 213 | 237 | 1263 |
| CJO1126.1 | 1 | 243 | 267 | 1264 |
| CJO1155.1 | 1 | 545 | 583 | 1265 |
| CJO1229.1 | 0 | 73 | 97 | 1267 |
| CJO1229.2 | 3 | 240 | 264 | 1267 |
| ECOA042.1 | 2 | 115 | 137 | 313 |
| CJO1184.1 | 8 | 48 | 73 | 1266 |
| CJO1184.2 | 10 | 69 | 93 | 1266 |
| CJO1184.3 | 10 | 89 | 113 | 1266 |
| CJO1236.1 | 12 | 9 | 33 | 1269 |
| CJO1262.1 | 9 | 375 | 399 | 1270 |
| CJO1266.1 | 13 | 335 | 359 | 1271 |
| CJO1266.2 | 12 | 461 | 489 | 1271 |
| CJO1266.3 | 10 | 485 | 513 | 1271 |
| CJO1266.4 | 11 | 509 | 536 | 1271 |
| CJO1267.1 | 13 | 30 | 62 | 1272 |
| CJO1267.2 | 11 | 58 | 90 | 1272 |
| CJO1272.1 | 14 | 581 | 605 | 1273 |
| CJO1290.1 | 13 | 101 | 131 | 1274 |
| CJO1290.2 | 10 | 127 | 157 | 1274 |
| CJO1316.1 | 7 | 317 | 349 | 1275 |
| CJO1316.2 | 8 | 345 | 377 | 1275 |
| CJO1333.1 | 9 | 534 | 558 | 1276 |
| CJO1338.1 | 6 | 108 | 133 | 1277 |
| CJO1338.2 | 8 | 234 | 261 | 1277 |
| CJO1338.3 | 7 | 257 | 284 | 1277 |
| CJO1338.4 | 4 | 280 | 307 | 1277 |
| CJO1338.5 | 6 | 303 | 330 | 1277 |
| CJO1339.1 | 7 | 2 | 27 | 1278 |
| CJO1339.2 | 6 | 23 | 48 | 1278 |
| CJO1339.3 | 5 | 44 | 68 | 1278 |
| CJO1339.4 | 0 | 82 | 106 | 1278 |
| CJO1339.5 | 0 | 104 | 128 | 1278 |
| CJO1339.6 | 1 | 152 | 176 | 1278 |
| CJO1339.7 | 0 | 373 | 397 | 1278 |
| CJO1341.1 | 0 | 324 | 348 | 1279 |
| CJO1342.1 | 0 | 196 | 223 | 1280 |
| CJO1342.2 | 0 | 219 | 246 | 1280 |
| CJO1346.1 | 0 | 263 | 294 | 1281 |
| CJO1346.2 | 0 | 291 | 323 | 1281 |
| CJO1379.1 | 3 | 183 | 207 | 1282 |
| CJO1380.1 | 0 | 176 | 200 | 1283 |
| CJO1422.1 | 0 | 297 | 321 | 1284 |
| CJO1426.1 | 0 | 91 | 115 | 1285 |
| CJO1463.1 | 0 | 11 | 41 | 1286 |
| CJO1463.2 | 0 | 37 | 67 | 1286 |
| CJO1463.3 | 0 | 63 | 92 | 1286 |
| CJO1466.1 | 0 | 157 | 190 | 1287 |
| CJO1466.2 | 0 | 186 | 219 | 1287 |
| CJO1474.1 | 0 | 240 | 264 | 1288 |
| CJO1478.1 | 2 | 51 | 75 | 1289 |
| CJO1484.1 | 1 | 31 | 55 | 1290 |
| CJO1500.1 | 4 | 166 | 190 | 1291 |
| CJO1511.1 | 2 | 10 | 34 | 1293 |
| ECOA042.1 | 11 | 115 | 137 | 313 |
| CJO1506.1 | 5 | 554 | 579 | 1292 |
| CJO1506.2 | 8 | 575 | 600 | 1292 |
| CJO1506.3 | 6 | 596 | 621 | 1292 |
| CJO1506.4 | 6 | 617 | 642 | 1292 |
| CJO1552.1 | 8 | 200 | 226 | 1295 |
| CJO1552.2 | 20 | 222 | 248 | 1295 |
| CJO1552.3 | 17 | 244 | 269 | 1295 |
| CJO1553.1 | 7 | 4 | 28 | 1296 |
| CJO1564.1 | 6 | 476 | 503 | 1297 |
| CJO1584.1 | 8 | 370 | 394 | 1298 |
| CJO1609.1 | 15 | 129 | 153 | 1299 |
| CJO1634.1 | 7 | 51 | 75 | 1301 |
| CJO1670.1 | 3 | 88 | 112 | 1302 |
| CJO1678.1 | 4 | 670 | 694 | 1303 |
| CJO1678.2 | 5 | 848 | 872 | 1303 |
| CJO1729.1 | 8 | 164 | 196 | 1306 |
| CJO1729.10 | 1 | 703 | 731 | 1306 |
| CJO1729.11 | 1 | 764 | 796 | 1306 |
| CJO1729.12 | 2 | 792 | 823 | 1306 |
| CJO1729.2 | 2 | 192 | 223 | 1306 |
| CJO1729.3 | 2 | 219 | 250 | 1306 |
| CJO1729.4 | 2 | 438 | 463 | 1306 |
| CJO1729.5 | 2 | 459 | 483 | 1306 |
| CJO1729.6 | 2 | 479 | 503 | 1306 |
| CJO1729.7 | 1 | 629 | 658 | 1306 |
| CJO1729.8 | 0 | 654 | 683 | 1306 |
| CJO1729.9 | 0 | 679 | 707 | 1306 |

[0343] TABLE 7D

| Peptide | Sum | From aa | To aa | SeqID |
|---|---|---|---|---|
| ECOA011.1 | 22 | 5 | 36 | 461 |
| ECOA015.1 | 21 | 32 | 51 | 463 |
| ECOA020.1 | 13 | 16 | 46 | 468 |
| ECOA021.1 | 10 | 12 | 33 | 469 |
| ECOA021.2 | 9 | 27 | 48 | 469 |
| ECOA023.1 | 18 | 10 | 39 | 470 |
| ECOA024.1 | 18 | 27 | 56 | 471 |
| ECOA024.2 | 19 | 52 | 81 | 471 |
| ECOA024.3 | 9 | 77 | 105 | 471 |
| ECOA024.4 | 9 | 101 | 129 | 471 |
| ECOA025.1 | 30 | 30 | 57 | 472 |
| ECOA025.2 | 41 | 53 | 80 | 472 |
| ECOA025.3 | 27 | 76 | 102 | 472 |
| ECOA027.1 | 7 | 48 | 77 | 473 |
| ECOA029.1 | 9 | 6 | 35 | 474 |
| ECOA032.1 | 13 | 233 | 257 | 301 |
| ECOA032.2 | 1 | 253 | 277 | 301 |
| ECOA032.3 | 3 | 273 | 297 | 301 |
| ECOA032.4 | 9 | 293 | 317 | 301 |
| ECOA033.1 | 7 | 290 | 317 | 303 |
| ECOA033.2 | 9 | 367 | 388 | 303 |
| ECOA034.1 | 1 | 240 | 265 | 305 |
| ECOA035.1 | 30 | 796 | 824 | 306 |
| ECOA036.1 | 4 | 624 | 653 | 307 |
| ECOA037.1 | 17 | 36 | 64 | 308 |
| ECOA037.2 | 5 | 60 | 87 | 308 |
| ECOA037.3 | 1 | 83 | 110 | 308 |
| ECOA037.4 | 1 | 106 | 133 | 308 |
| ECOA038.1 | 13 | 120 | 148 | 309 |
| ECOA039.1 | 9 | 71 | 106 | 310 |
| ECOA040.1 | 6 | 741 | 764 | 311 |
| ECOA040.2 | 2 | 760 | 783 | 311 |
| ECOA043.1 | 2 | 450 | 483 | 314 |
| ECOA044.1 | 2 | 111 | 137 | 316 |
| ECOA045.1 | 3 | 896 | 923 | 317 |
| ECOA046.1 | 11 | 565 | 595 | 319 |
| ECOA047.1 | 1 | 178 | 204 | 320 |
| ECOA047.2 | 2 | 200 | 226 | 320 |
| ECOA047.3 | 2 | 222 | 248 | 320 |
| ECOA047.4 | 2 | 244 | 269 | 320 |
| ECOA047.5 | 5 | 265 | 296 | 320 |
| ECOA048.4 | 7 | 1343 | 1369 | 321 |
| ECOA049.1 | 5 | 180 | 209 | 321 |
| ECOA049.2 | 3 | 205 | 233 | 321 |
| ECOA049.3 | 1 | 229 | 258 | 321 |
| ECOA050.1 | 2 | 242 | 270 | 322 |
| ECOA050.2 | 2 | 266 | 294 | 322 |
| ECOA050.3 | 2 | 290 | 318 | 322 |
| ECO2330.1 | 4 | 259 | 268 | 360 |
| ECOA041.1 | 13 | 278 | 305 | 312 |
| ECOA042.1 | 35 | 115 | 137 | 313 |
| ECOA051.1 | 17 | 89 | 116 | 326 |
| ECOA051.2 | 16 | 112 | 139 | 326 |
| ECOA051.3 | 15 | 135 | 162 | 326 |
| ECOA052.1 | 21 | 76 | 97 | 329 |
| ECOA052.2 | 30 | 93 | 114 | 329 |
| ECOA053.1 | 17 | 39 | 66 | 331 |
| ECOA053.2 | 23 | 62 | 88 | 331 |
| ECOA053.3 | 32 | 84 | 110 | 331 |
| ECOA054.1 | 29 | 244 | 274 | 333 |
| ECOA055.1 | 15 | 548 | 572 | 335 |
| ECOA056.1 | 31 | 165 | 200 | 336 |
| ECOA058.1 | 15 | 1 | 35 | 338 |
| ECOA059.1 | 18 | 662 | 695 | 339 |
| ECOA060.1 | 23 | 232 | 256 | 342 |
| ECOA060.2 | 6 | 252 | 283 | 342 |
| ECOA061.1 | 9 | 588 | 620 | 343 |
| ECOA062.1 | 10 | 197 | 229 | 345 |
| ECOA062.2 | 10 | 225 | 256 | 345 |
| ECOA062.3 | 9 | 252 | 283 | 345 |
| ECOA063.1 | 11 | 212 | 244 | 347 |
| ECOA063.2 | 5 | 240 | 272 | 347 |
| ECOA063.3 | 7 | 395 | 429 | 347 |
| ECOA064.1 | 27 | 209 | 230 | 348 |
| ECOA065.1 | 36 | 78 | 106 | 349 |
| ECOA065.2 | 14 | 102 | 130 | 349 |
| ECOA066.1 | 8 | 118 | 142 | 350 |
| ECOA067.1 | 5 | 105 | 133 | 351 |
| ECOA067.2 | 9 | 129 | 156 | 351 |
| ECOA067.3 | 9 | 152 | 180 | 351 |
| ECOA068.1 | 2 | 147 | 175 | 352 |
| ECOA069.1 | 7 | 16 | 44 | 353 |
| ECOA070.1 | 4 | 102 | 131 | 354 |
| ECOA071.1 | 7 | 328 | 355 | 355 |
| ECOA072.1 | 7 | 436 | 465 | 357 |
| ECOA074.1 | 23 | 139 | 166 | 363 |
| ECOA076.1 | 8 | 373 | 401 | 365 |
| ECOA077.1 | 6 | 114 | 148 | 367 |
| ECOA078.1 | 6 | 23 | 48 | 369 |
| ECOA078.2 | 3 | 44 | 70 | 369 |
| ECOA078.3 | 0 | 71 | 99 | 369 |
| ECOA120.1 | 2 | 34 | 53 | 425 |
| ECOA142.1 | 2 | 164 | 193 | 456 |
| ECOA142.2 | 4 | 189 | 218 | 456 |
| ECOA142.3 | 10 | 214 | 244 | 456 |
| ECOA126.1 | 15 | 1522 | 1552 | 431 |
| ECOA141.1 | 17 | 17 | 49 | 475 |
| ECOA144.1 | 20 | 122 | 149 | 459 |
| ECOA146.1 | 38 | 106 | 136 | 460 |
| ECOA147.1 | 11 | 26 | 51 | 476 |
| ECOA147.2 | 30 | 47 | 72 | 476 |
| ECOA147.3 | 31 | 68 | 92 | 476 |
| ECOA160.1 | 28 | 187 | 208 | 477 |
| ECOA160.2 | 27 | 204 | 224 | 477 |
| ECOA73.1 | 10 | 654 | 682 | 361 |
| ECOA75.1 | 18 | 944 | 970 | 364 |
| ECOA75.2 | 26 | 966 | 992 | 364 |
| ECOA75.3 | 7 | 988 | 1015 | 364 |
| ECOb2969.1 | 18 | 242 | 256 | 457 |
| ECOb2986.1 | 14 | 60 | 88 | 457 |
| SFO0179.1 | 40 | 96 | 124 | 1042 |
| SFO2968.1 | 6 | 550 | 575 | 1031 |
| SFO2968.2 | 8 | 571 | 596 | 1031 |
| SFO2968.3 | 5 | 592 | 616 | 1031 |
| SFO2972.1 | 14 | 9 | 22 | 1032 |
| SFOSepA.1 | 0 | 139 | 163 | 1007 |
| SFOSepA.2 | 1 | 159 | 183 | 1007 |
| SFOSepA.3 | 38 | 179 | 203 | 1007 |
| SFOSepA.4 | 22 | 199 | 220 | 1007 |
| SFOSepA.5 | 13 | 549 | 576 | 1007 |
| SFOSepA.6 | 3 | 572 | 599 | 1007 |
| SFOSepA.7 | 0 | 595 | 622 | 1007 |
| ECO0041.1 | 11 | 70 | 88 | 302 |
| ECO0063.1 | 24 | 134 | 147 | 303 |
| ECO0321.1 | 23 | 378 | 400 | 315 |
| ECO0345.1 | 20 | 3 | 19 | 318 |
| ECO0557.1 | 15 | 103 | 119 | 323 |
| ECO0565.1 | 23 | 266 | 292 | 324 |
| ECO0594.1 | 20 | 179 | 193 | 325 |
| ECO0602.1 | 18 | 282 | 296 | 327 |
| ECO0605.1 | 19 | 718 | 740 | 328 |
| ECO0776.1 | 36 | 1 | 29 | 330 |
| ECO0776.2 | 12 | 30 | 58 | 330 |
| ECO0776.3 | 14 | 59 | 87 | 330 |
| ECO0855.1 | 26 | 54 | 69 | 332 |
| ECO0880.1 | 16 | 33 | 56 | 334 |
| ECO1140.1 | 23 | 71 | 84 | 340 |
| ECO1392.1 | 32 | 60 | 70 | 341 |
| ECO1638.1 | 10 | 17 | 41 | 344 |
| ECO1646.1 | 6 | 110 | 127 | 346 |
| ECO2062.1 | 18 | 101 | 122 | 356 |
| ECO2099.1 | 5 | 408 | 427 | 358 |
| ECO2178.1 | 5 | 42 | 61 | 359 |
| ECO2364.1 | 15 | 40 | 59 | 362 |
| ECO2491.1 | 9 | 178 | 193 | 366 |
| ECO2540.1 | 3 | 518 | 545 | 368 |
| ECO2540.2 | 9 | 541 | 568 | 368 |
| ECO2540.3 | 2 | 564 | 591 | 368 |
| ECOA012.1 | 1 | 415 | 440 | 462 |
| ECOA012.2 | 2 | 436 | 461 | 462 |
| ECOA012.3 | 3 | 457 | 482 | 462 |
| ECOA012.4 | 6 | 478 | 503 | 462 |
| ECOA016.1 | 33 | 1 | 29 | 464 |
| ECOA016.2 | 3 | 53 | 80 | 464 |
| ECOA016.3 | 1 | 76 | 103 | 464 |
| ECOA016.4 | 8 | 99 | 126 | 464 |
| ECOA017.1 | 1 | 342 | 366 | 465 |
| ECOA017.2 | 1 | 362 | 386 | 465 |
| ECOA017.3 | 0 | 382 | 406 | 465 |
| ECOA017.4 | 15 | 402 | 428 | 465 |
| ECOA018.1 | 0 | 342 | 369 | 466 |
| ECOA018.2 | 1 | 365 | 392 | 466 |
| ECOA018.3 | 1 | 388 | 415 | 466 |
| ECOA018.4 | 2 | 411 | 438 | 466 |
| ECOA018.5 | 1 | 434 | 461 | 466 |
| ECOA018.6 | 0 | 457 | 484 | 466 |
| ECOA019.1 | 8 | 530 | 558 | 467 |
| ECOA019.2 | 16 | 554 | 582 | 467 |
| ECOA019.3 | 2 | 578 | 606 | 467 |
| ECOA019.4 | 22 | 632 | 659 | 467 |

[0344] TABLE 8
Additional immunogenic proteins identified from E. coli by bacterial surface display.

| | | | No. of | Location of | | |
|---|---|---|---|---|---|---|
| | | | selected | identified | | |
| E. coli | | | clones per | immunogenic | Seq. | Seq. |
| antigenic | Putative function | | ORF and | region | ID | ID |
| protein | (by homology) | predicted immunogenic aa* | screen | (aa) | (DNA) | (Protein) |
| b3327 | putative general | 34-42, 56-87, 95-133, 136-146, 157-213, | E: 2 | 196-215 | 1337 | 1365 |
| | protein secretion | 219-235, 246-282, 313-333, | | | | |
| | protein | 358-394 | | | | |
| EAEC166 | 62K membrane antigen | 67-74, 88-94, 112-118, 127-138, | H: 4 | 27-129 | 1338 | 1366 |
| | ipaB | 155-169, 171-180, 183-190, 196-205, | | | | |
| | | 243-249, 260-271, 308-344, | | | | |
| | | 346-373, 381-414, 416-457, 473-513, | | | | |
| | | 515-524, 528-535, 539-544, | | | | |
| | | 556-566, 572-580, 585-590 | | | | |
| EAEC168 | Nickel transport ATP- | 4-16, 21-36, 38-47, 54-64, 92-103, | L: 7 | 128-153 | 1339 | 1367 |
| | binding protein nikE | 117-126, 135-155, 157-200, 202-223, | | | | |
| | | 231-239, 246-262 | | | | |
| EAEC169 | hypothetical protein | 4-10, 16-30 | L: 2 | 11-43 | 1340 | 1369 |
| EAEC170 | pitrilysin | 7-22, 52-77, 83-93, 101-111, 125-136, | C: 2 | 246-271 | 1341 | 1370 |
| (ECs3678) | | 139-157, 212-221, 231-239, | | | | |
| | | 241-247, 264-273, 275-294, 329-336, | | | | |
| | | 349-357, 365-379, 389-405, | | | | |
| | | 419-434, 439-445, 456-462, 467-481, | | | | |
| | | 493-506, 508-516, 522-545, | | | | |
| | | 547-556, 566-583, 611-627, 655-670, | | | | |
| | | 678-693, 717-724, 734-748, | | | | |
| | | 756-766, 772-790, 797-808, 815-820, | | | | |
| | | 825-831, 833-838, 851-868, | | | | |
| | | 891-917, 919-926, 933-940, 944-953 | | | | |
| EAEC172 | hypothetical protein | 4-12, 14-31, 42-59, 61-69, 73-83, | A: 1 | 660-694 | 1342 | 1371 |
| (ECs3900) | | 96-103, 140-149, 153-165, 180-187, | | | | |
| | | 199-208, 222-230, 232-240, 248-254, | | | | |
| | | 256-270, 274-283, 289-299, | | | | |
| | | 302-317, 322-328, 332-345, 351-365, | | | | |
| | | 387-396, 419-432, 441-447, | | | | |
| | | 453-466, 487-505, 508-524, 560-571, | | | | |
| | | 580-590, 592-605, 625-633, | | | | |
| | | 639-647, 652-658, 671-679, 722-728 | | | | |
| EAEC173 | yhcM | 4-13, 26-39, 53-59, 68-74, 88-95, | C: 2 | 79-101 | 1343 | 1372 |
| (ECs4105) | | 102-119, 125-132, 136-150, 153-162, | | | | |
| | | 165-175, 188-228, 238-245, | | | | |
| | | 268-283, 285-307, 317-324, 326-343, | | | | |
| | | 350-359 | | | | |
| EAEC174 | periplasmic dipeptide | 10-37, 55-68, 71-78, 92-98, 115-122, | A: 2 | 187-224 | 1344 | 1373 |
| (ECs4424) | transport protein | 131-138, 149-158, 163-170, | | | | |
| | precursor dppA | 172-189, 212-219, 239-257, 259-271, | | | | |
| | | 289-302, 304-320, 322-340, | | | | |
| | | 359-366, 373-384, 400-412, 444-453, | | | | |
| | | 460-474, 485-527 | | | | |
| EAEC175 | dTDPglucose 4,6- | 13-21, 27-36, 41-50, 55-64, 66-72, | C: 4 | 142-171 | 1345 | 1374 |
| (ECs4721) | dehydratase | 74-90, 103-112, 127-136, 153-164, | | | | |
| | | 166-186, 193-219, 224-242, 260-273, | | | | |
| | | 278-294, 298-306, 328-334 | | | | |
| ECs0560 | RhsD core protein with | 16-29, 31-41, 49-61, 63-81, 86-92, | E: 1 | 372-393 | 1346 | 1375 |
| | extension | 107-114, 122-135, 155-177, 195-211, | | | | |
| | | 245-252, 264-270, 273-279, | | | | |
| | | 297-322, 327-334, 339-348, 371-378, | | | | |
| | | 380-389, 402-408, 414-421, | | | | |
| | | 424-430, 452-459, 481-488, 500-506, | | | | |
| | | 543-556, 567-573, 588-594, | | | | |
| | | 608-615, 628-633, 668-675, 683-689, | | | | |
| | | 700-706, 735-750, 793-802, | | | | |
| | | 816-822, 841-846, 848-855, 858-864, | | | | |
| | | 894-913, 921-929, 941-948, | | | | |
| | | 974-990, 993-1005, 1053-1068, | | | | |
| | | 1096-1110, 1117-1123, 1126-1145, | | | | |
| | | 1149-1168, 1191-1203, 1219-1225, | | | | |
| | | 1239-1248, 1253-1265, 1297-1309, | | | | |
| | | 1356-1370, 1373-1379, 1388-1395 | | | | |
| ECs3841 | ornithine decarboxylase | 5-15, 29-37, 39-46, 51-60, 65-71, | F: 1 | 315-397 | 1347 | 1376 |
| | isozyme | 73-97, 105-131, 137-152, 154-161, | | | | |
| | | 173-185, 193-210, 214-222, 224-232, | | | | |
| | | 241-255, 266-274, 277-289, | | | | |
| | | 291-303, 307-338, 345-352, 358-371, | | | | |
| | | 389-395, 402-422, 433-440, | | | | |
| | | 444-465, 471-478, 498-513, 524-536, | | | | |
| | | 542-558, 561-576, 584-602, | | | | |
| | | 604-623, 631-639, 643-658, 667-683, | | | | |
| | | 689-716 | | | | |
| Non-ORF | | | | | | |
| ARF- | hypothetical protein | 7-25, 30-37, 39-60, 69-86 | P: 5 | 75-89 | 1348 | 1377 |
| b0289 | | | | | | |
| ARF153 | hypothetical protein | — | L: 1 | 16-30 | 1349 | 1378 |
| ARF154 | hypothetical protein | — | L: 16 | 8-27 | 1350 | 1379 |
| CRF82 | hypothetical protein | 4-22, 29-48, 50-58, 62-69, 71-78 | L: 5 | 6-36 | 1351 | 1380 |
| CRF3349 | hypothetical protein | 4-23 | E: 4 | 3-24 | 1352 | 1381 |
| CRF3370 | hypothetical protein | 4-12, 30-66 | E: 12 | 11-33 | 1353 | 1382 |
| CRF3376 | hypothetical protein | 4-9, 40-64, 68-82 | E: 9 | 54-72 | 1354 | 1383 |
| CRF3792 | hypothetical protein | 4-42 | E: 103 | 11-39 | 1355 | 1384 |
| CRF4475 | hypothetical protein | 15-24, 77-88, 90-103, 116-123, 134-144 | E: 2 | 23-33 | 1356 | 1385 |
| CRF4857 | hypothetical protein | 17-25, 47-56, 68-79 | E: 2 | 64-74 | 1357 | 1386 |
| CRF5082 | hypothetical protein | 4-12, 14-21, 27-33 | E: 2 | 7-25 | 1358 | 1387 |
| CRF5163 | hypothetical protein | 4-10, 25-37 | E: 17 | 5-23 | 1359 | 1388 |
| CRF5313 | hypothetical protein | 4-9, 14-29, 38-44, 49-67, 69-97, | E: 2 | 495-511 | 1360 | 1389 |
| | | 118-128, 135-146, 151-157, 159-172, | | | | |
| | | 196-203, 227-241, 253-259, | | | | |
| | | 262-271, 284-295, 299-309, 343-353, | | | | |
| | | 356-362, 392-406, 410-416, | | | | |
| | | 429-441, 463-478, 503-509 | | | | |
| NRF7 | hypothetical protein | 4-12, 24-33, 39-51, 57-63, 78-87 | C: 2 | 32-56 | 1361 | 1390 |
| NRF8 | hypothetical protein | 8-15, 29-40, 48-54 | C: 3 | 33-56 | 1362 | 1391 |
| NRF9 | hypothetical protein | 12-61 | E: 8 | 35-61 | 1363 | 1392 |
| NRF10 | hypothetical protein | — | B: 1 | 8-27 | 1364 | 1393 |

### REFERENCES

[0345] Altboum, Z., et al. (2001). Immun. 69:3150-8.
[0346] Altschul, S., et al. (1990). Journal of Molecular Biology 215: 403-10.
[0347] Bennett, D., et al. (1995). J. Mol Recognit 8: 52-8.
[0348] Clackson, T., et al. (1991). Nature 352: 624-8.
[0349] Cohen, M. (1991). J. Pediatr. 118: S34-9.
[0350] Devereux, J., et al. (1984). Nucleic acids research 12: 387-95.
[0351] Doherty, E., et al. (2001). Annu Rev Biophys Biomol Struct 30: 457-475.
[0352] Eisenbraun, M., et al. (1993). DNA Cell Biol 12: 791-7.
[0353] Etz, H., et al. (2001). J. Bacteriol 183: 6924-35.
[0354] Ganz, T. (1999). Science 286: 420-421.
[0355] Georgiou, G. (1997). Nature Biotechnology 15:29-34.
[0356] Hashemzadeh-Bonehi, L., et al. (1998). Mol Microbiol 30: 67-678.
[0357] Heinje, von G. (1987) e.g. Sequence Analysis in Molecular Biology, Academic Press.
[0358] Hemmer, B., et al. (1999). Nat Med 5: 1375-82.
[0359] Hoe, N., et al. (2001). J. Infect Dis 183: 633-9.
[0360] Hornef, M., et al. (2002). Nat Immunol 3: 1033-40.
[0361] Johanson, K., et al. (1995). J. Biol Chem 270: 9459-71.
[0362] Jones, P., et al. (1986). Nature 321: 522-5.
[0363] Kajava, A., et al. (2000). J. Bacteriol 182: 2163-9.
[0364] Kohler, G., et al. (1975). Nature 256: 495-7.
[0365] Kolaskar, A., et al. (1990). FEBS Lett 276: 172-4.
[0366] Lewin, A., et al. (2001). Trends Mol Med 7: 221-8.
[0367] Marks, J, et al. (1992). Biotechnology (NY) 10: 779-83.
[0368] McCafferty, J., et al. (1990). Nature 348:552-4.
[0369] Okano, H., et al. (1991). J. Neurochem 56: 560-7.
[0370] Oligodeoxynucleotides as Antisense Inhibitors of Gene Expression; CRC Press, Boca Raton, Fla. (1988).
[0371] Rammensee, H., et al. (1999). Immunogenetics 50: 213-9.
[0372] Seeger, C., et al. (1984). Proc Natl Acad Sci USA 81:5849-52.
[0373] Skerra, A. (1994). Gene 151: 131-5.
[0374] Tang, D., et al. (1992). Nature 356: 152-4.
[0375] Tempest, P., et al. (1991). Biotechnology (NY) 9:266-71.
[0376] Tourdot, S., et al. (2000). Eur J. Immunol 30: 3411-21.
[0377] Turbyfill, K., et al. (2000). Infect Immun. 68: 6624-32.
[0378] Wiley, J., et al. (1987) Current Protocols in Molecular Biology

The application's sequence listing, which the Patent Office published only in electronic form, follows.

SEQUENCE LISTING (1393 sequences)

SEQ ID NO: 1 - DNA, 1917 bp, Escherichia coli
atgggtaaaataattggtatcgacctgggtactaccaactcttgtgtagcgattatggatggcaccactcctcgtgtgctggagaacgccgaaggcgatcgcaccacgccttctatcattgcctatacccaggatggtgaaactctggttggtcagccggctaaacgtcaggcagtgacgaacccgcaaaacaccctgtttgcgattaaacgcctgattggccgccgcttccaggacgaagaagtacagcgtgatgtttccatcatgccgttcaaaattattgctgctgataacggcgacgcatgggtcgaagttaaaggccagaaaatggcaccgccgcagatttctgctgaagtgctgaaaaaaatgaagaaaaccgctgaagattacctgggtgaaccggtaactgaagctgttatcaccgtaccggcatactttaacgatgctcagcgtcaggcaaccaaagacgcaggccgtatcgctggtctggaagtaaaacgtatcatcaacgaaccgaccgcagctgcgctggcttacggtctggacaaaggtactggcaaccgtactatcgcggtttatgacttgggtggtggtactttcgatatttctattatcgaaatcgacgaagttgacggcgaaaaaaccttcgaagttctggcaaccaacggtgatacccacctgggtggtgaagacttcgacagccgtctgatcaactatctggttgaagaattcaagaaagatcagggcattgacctgcgcaacgatccgctggcaatgcagcgcctgaaagaagcggcagaaaaagcgaaaatcgaactgtcttccgctcagcagaccgacgttaacctgccgtacatcactgcagacgcgaccggtccgaaacacatgaacatcaaagtgactcgtgcgaaactggaaagcctggttgaagatctggttaaccgttccatcgagccgctgaaagttgcgctgcaggacgctggcctgtccgtatctgatatcgacgacgttatcctcgttggtggtcagactcgtatgccaatggttcagaagaaagttgctgagttctttggtaaagagccgcgtaaagacgttaacccggacgaagctgtagcaatcggtgctgctgttcagggtggtgttctgactggtgacgtaaaagacgtactgctgctggatgttaccccgctgtctctgggtatcgaaaccatgggcggtgtgatgacgacgctgatcgcgaaaaacaccactatcccgaccaagcacagccaggtgttctctaccgctgaagacaaccagtctgcggtaaccatccatgtgctgcagggtgaacgtaaacgtgcggctgacaacaaatctctgggtcagttcaacctggatggtatcaacccggcaccgcgcggcatgccgcagatcgaagttaccttcgatatcgatgctgacggtatcctgcacgtttccgcgaaagataaaaacagcggtaaagagcagaagatcaccatcaaggcgtcttctggtctgaacgaagatgaaatccagaaaatggtacgcgacgccgaagctaacgccgaagctgaccgtaagtttgaagagctggtacagactcgcaaccagggcgaccatctgctgcacagcacccgtaagcaggttgaagaagcaggcgacaaactgccggctgacgacaaaactgctatcgagtctgcgctgactgcactggaaactgctctgaaaggtgaagacaaagccgctatcgaagcgaaaatgcaggaactggcacaggtttcccagaaactgatggaaatcgcccagcagcaacatgcccagcagcagactgccggtgctgatgcttctgcaaacaacgcgaaagatgacgatgttgtcgacgctgaatttgaagaagtcaaagacaaaaaataa

SEQ ID NO: 2 - DNA, 1218 bp, Escherichia coli
atggatcatctacccatgccgaaattcgggccgttggccggattgcgcgttgtcttctccggtatcgaaattgccgggccgttcgccgggcaaatgttcgcagaatggggtgcggaagttatctggatcgagaacgtcgcctgggccgacaccattcgcgttcaaccgaactacccgcaactctcccgccgcaatttgcacgcgctgtcgttaaatattttcaaagatgaaggccgcgaagcgtttctgaaattaatggaaaccaccgatatcttcatcgaagccagtaaaggtccggcctttgcccgtcgtggcattaccgatgaagtactgtggcaacacaacccgaaactggttatcgctcacctgtccggttttggtcagtacggcaccgaggagtacaccaatcttccggcctataacaccatcgcccaggccttcagtggttacctgattcagaacggtgatgttgaccagccaatgcctgccttcccgtataccgccgattacttttctggcctgaccgccaccacggcggcgctggcagcactgcataaagcgcgtgaaaccggtaaaggcgaaagtatcgacatcgccatgtatgaagtgatgctgcgtatgggccagtacttcatgatggattacttcaacggcggcgaaatgtgcccgcgcatgagcaaaggtaaagatccctactatgccggttgcggtctgtataaatgtgccgacggctacatcgtgatggaactggtgggcattacccaaattgaagagtgctttaaagatattggcctcgcacatctactcggtacgccggaaatcccggaaggcactcagcttatccaccgtatcgaatgcccttacggcccactggtagaagaaaaactcgatgcctggctggcggcacataccatcgcagaagttaaagaacgctttgccgaactgaatatcgcctgtgccaaagtactgaccgtaccggaactggaaagcaatccacagtatgttgcccgtgaatcaatcactcagtggcaaacgatggatggtcgcacctgcaaagggccgaacatcatgccgaaattcaaaaataaccccggacaaatctggcgcggaatgccctcacatggcatggacacggctgccattttgaaaaatatcggctacagcgaaaacgacattcaggagttggtcagcaaaggtctggccaaagttgaggactaa

SEQ ID NO: 3 - DNA, 2907 bp, Escherichia coli
atgccttttacacttggtcaacgctggatcagcgatacagaaagcgaattgggacttggaaccgttgtcgcggtggatgcgcgaactgtcactttacttttcccatctactggtgaaaaccgtctgtacgcacgcagtgattcccccgtgacccgcgtgatgttcaaccctggtgataccattaccagccatgacggctggcagatgcaagtcgaagaagtaaaagaagaaaatggcttgctgacctatatcggtactcgcctggatactgaagagtccggcgtagccctgcgtgaagttttccttgatagcaaactggtgttcagcaaaccgcaggaccgcctgtttgccgggcagattgaccgtatggaccgctttgcgctgcgttatcgcgcgcgtaagtattccagcgaacagttccgtatgccgtacagcggcctgcgcggtcagcgtaccagcctgatcccgcaccagctcaacatcgctcatgatgttggccgccgccacgcgccgcgcgtcctgctggctgacgaagtgggtttagggaaaaccattgaagccgggatgatccttcatcagcaactgctctctggcgctgctgaacgtgtgctgattatcgtcccggaaaccttacagcatcagtggctggtagaaatgctgcgccgtttcaacctgcgctttgcgctgtttgatgatgagcgttatgccgaagctcagcacgatgcttacaacccgttcgacaccgaacagctggtgatttgctcgctggattttgcccgccgtagcaaacagcgtctggaacatctctgtgaagccgagtgggacctgctggtggtcgatgaagcgcatcacctggtgtggagcgaagacgcgccgagccgcgaatatcaggctattgaacaactggcagagcacgtgccgggcgttctgctgctgaccgcaaccccggaacagctgggaatggaaagccacttcgcccgtctgcgtctgctggacccgaaccgtttccacgatttcgcgcaattcgttgaagagcagaaaaattatcgtccagtagcggacgccgttgccatgctgctggcaggtaacaaactgagcaatgacgaactgaacatgcttggcgagatgatcggcgagcaggatatcgagccgctgttgcaagcagcaaacagcgacagcgaagatgcccagagcgcccgtcaggagctggtttcgatgctgatggatcgccacggcaccagccgcgtgctgttccgtaacacccgtaacggtgtgaaaggcttcccgaaacgcgagctgcacaccattaagctgccgctaccgacgcagtatcagacggctattaaagtctccggcattatgggcgcacgtaaaagtgcggaagaccgcgcccgcgatatgctctacccggagcgtatttatcaggaatttgaaggtgataacgccacctggtggaacttcgatccgcgcgttgagtggctgatgggctacctgaccagccatcgctctcagaaagtgctggtgatctgcgctaaagctgccactgcgctgcaactggagcaagtactgcgcgaacgtgaaggtattcgcgctgcggtgttccacgaaggtatgtcgattatcgaacgtgaccgcgctgccgcctggtttgccgaagaagacaccggcgcacaggtactgctgtgctcagaaatcggttctgaaggacgtaacttccagttcgccagccacatggtgatgtttgacctgccattcaacccggatctactggagcagcgtattggtcgtctggatcgtatcggccaagcgcacgatattcagatccatgtgccttatctggagaaaaccgctcagtcggtgctggtgcgctggtatcacgaaggtctggatgcatttgagcacacctgcccgaccggacgcactatttacgatagcgtatacaacgatctgattaactatctggcttcaccggatcaaaccgaaggctttgacgatctgatcaaaaactgccgcgagcaacatgaagcgctgaaagcacagctggaacagggtcgtgaccgcctgctggaaatccactccaacggtggcgaaaaagcccaggcactggcagaaagcattgaagagcaggatgacgataccaacctgatcgccttcgccatgaacctgttcgatattatcggtatcaatcaggacgatcgcggcgacaacatgatcgtgctgacgccgtccgatcatatgctggtgccggacttccctggcctgtcggaagatggcatcaccatcacctttgatcgtgaagtggcgctggcgcgtgaagatgcgcagtttattacctgggaacatccgctgatccgcaacggtctggatctgattctttctggcgataccggtagcagcacgatttcactgttaaaaaacaaagcgttgccggtaggtacgctgttggtggaactgatttatgtggttgaagcccaggctccgaagcagttgcagctcaaccgcttcctgccaccgacgccggtacgtatgctgctggataaaaacggcaacaacctggcggcgcaggtagagtttgaaacctttaaccgccagcttaacgcggttaaccgtcacaccggcagcaaactggttaacgccgtgcagcaggatgttcacgctatccttcaactgggtgaagcgcagatcgagaaatctgcccgtgcattgattgatgcagcacgtaacgaagccgacgaaaaactgtctgccgagctgtctcgtctggaagctctgcgtgcagtgaacccgaacattcgtgacgacgaactgaccgccattgagagcaaccgtcagcaggtaatggaaagcctggatcaggcaggttggcgtctggatgccctgcgtttgatcgttgtaacgcatcagtaa

SEQ ID NO: 4 - DNA, 1701 bp, Escherichia coli
atggcgattgcaattggcctcgattttggcagtgattctgtgcgagctttggcggtggactgcaccaccggtgaagaaatcgccaccagcgtagagtggtatccccgttggcaaaaagggcaattttgtgatgccccgaataaccagttccgtcatcatccgcgtgactacattgagtcaatggaagcggcactgaaaaccgtgcttgcagaacttagcgtcgaacagcgcgcagctgtggtcgggattggcgttgacagtaccggctcgacgcccgcaccgattgatgccgacggtaacgtgctggcgctgcgcccggagtttgccgaaaacccgaacgcgatgttcgtattgtggaaagaccacactgcggttgaagaagcggaagagattacccgtttgtgccacgcgccgggcaatgttgactactcccgctatattggcggtatttattccagcgaatggttctgggcaaaaatcctgcatgtgactcgccaggacagcgccgtggcgcaatctgccgcatcgtggattgagctgtgcgactgggtgccagctctgctttccggtaccacgcgcccgcaggatattcgtcgcggacgttgcagcgccgggcataagtcgctatggcacgaaagctggggcggcctgccgccagccagtttctttgatgagctggatccgatcctcaatcgccatttgccttccccgctgttcactgatacctggactgccgatattccggtgggcaccttatgcccggaatgggcgcagcgtctcggcctgcctgaaagcgtggtgatttccggcggcgcgtttgactgccatatgggcgcagttggtgcaggcgcacagcctaacgcactggtaaaagttatcggtacttccacctgcgacattctgattgccgacaaacagagcgttggcgagcgggcagtgaaaggtatttgcggtcaggttgatggcagcgtggtgcctggatttatcggtctggaagcaggccaatcggcgtttggtgatatctacgcctggttcggtcgcgtactcggctggccgctggaacagcttgccgcccagcatccggaactaaaagagcaaatcgacgccagccagaaacaactgcttccggcgctgaccgaagcatgggccaaaaatccgtctctggatcacctgccggtggtgctcgactggtttaacggccgccgcacaccgaacgctaaccaacgcctgaaaggggtgattaccgatcttaacctcgctaccgacgctccgctgctgttcggcggtttgattgctgccaccgcctttggcgcacgcgcaatcatggagtgctttaccgatcaggggatcgccgtcaataacgtgatggcgctgggcggcatcgcgcggaaaaaccaggtcattatgcaggcctgctgcgacgtgctgaatcgcccgctgcaaattgttgcctctgaccaatgctgtgcgctcggtgcggcgatttttgctgccgtcgccgcgaaagtgcacgcagacatcccatcagcccagcaaaaaatggccagtgcggtagagaaaaccctgcaaccgcgcagcgaacaggcacaacgctttgaacagctttatcgccgctatcagcaatgggcgatgagcgccgaacaacactatcttccaacttccgccccggcacaggctgcccaggccgttccgactctataa

SEQ ID NO: 5 - DNA, 1488 bp, Escherichia coli
gtggcagatcgtaatttgcgcgaccttcttgctccgtgggtgccagacgcaccttcgcgagcactgcgagagatgacactcgacagccgtgtggctgcggcgggcgatctctttgtagctgtagtaggtcatcaggcggacgggcgtcgatatatcccgcaggcgatagcgcaaggtgtggctgccattattgcagaggcgaaaggtgaggcgaccgacggtgaaatccgtgaaatgcacggcgtaccggtcatctatctcagccagctcaacgagcgtttatctgcactggcgggccgcttttaccatgaaccctctgacaatttacgtctcgtgggcgtaacgggcaccaacggcaaaaccacgacgacccagctgctggcgcagtggagccaactgcttggcgaaaccagcgcggtaatgggcaccgttggtaacggtctgctggggaaagtgatcccgacagaaaataccaccggttcggcagttgatgttcagcatgagctggcggggctggtggatcaggacgcgactttttgcgcaatggaagtttcctcccacgggctggtacagcaccgtgtggcggcattgaaatttgcggcgtcggtctttactaacttaagccgcgatcaccttgattatcatggtgatatggaacactacgaagctgcgaaatggctgctttattctgaacatcattgcggtcaggcgattattaatgccgacgatgaagtaggccgccgctggctggcaaaactgccggatgcagttgcggtatcaatggaagatcatatcaatccgaactgtcacggacgctggttgaaagcgaccgaagtgaactatcacgacagcggtgcgactattcgctttagctcaagttggggcgatggcgaaattgaaagccatctgatgggcgcttttaacgtcagcaacctgctgctcgcgctggcgacgctgctggcgctgggctatccactggctgatctgctgaaaaccgctgctcgtctgcaaccggtttgcggacgtatggaagtgttcactgcgccaggcaaaccgacggtggtggtggattacgcgcatacgccggatgcactggaaaaagccttacaggcggcgcgtctgcactgtgcgggcaagctgtggtgtgtctttggctgtggtggcgatcgcgataaaggtaagcgtccactgatgggcgcaattgccgaagagtttgctgatgtggcggtggtgacggacgataatccgcgtaccgaagagccgcgtgccatcatcaacgatattctggcgggaatgttagatgccggacatgccaaagtgatggaagaccgtgctgaagcggtgacttgcgccgttatgcaggctaaagagaacgatgtggtgctggtcgcgggcaaaggccatgaagattaccagattgttggcaatcagcgtctggactactccgatcgcgtcacggtggcgcgtctgctgggggtgattgcatga

SEQ ID NO: 6 - DNA, 2475 bp, Escherichia coli
atgctacaatgtggcgcgaagaatgttaaccctctggagcgttttgtgtcgtcgttgcccgttgctgccgtgttacctgaattacttaccgctctcgattatgcgccgcaggtattattaagtgcgccgaccggggccgggaaatcaacctggctgccgctgcaactgctggcgcatcccggcattaacgggaaaattatcctcctggagccacggcgtctggcggcgcgtaacgtcgcgcaacggctggcggagctgcttaacgaaaagccaggcgataccgttggctaccggatgcgtgcgcaaaactgcgtcgggccgaatacccgcctggaagtagttaccgaaggcgtgctgacgcggatgatccagcgtgacccggaactgagcggtgttggattggtgatccttgatgaatttcatgagcgtagcttgcaggcggatttggcgttggcgctgttactcgatgtgcaacaaggtctgcgtgatgaccttaaactgctgattatgtcggctacgctggacaacgaccgcttgcagcaaatgctgccagaagcgcccgtcgtcatctcagaagggcgctcgtttccggttgaacgccgttatttaccgctgcccacgcatcagcgttttgacgatgccgttgcggtagccaccgctgaaatgctgcgtcaggaaagcggatcattactgttatttttacctggcgtcggagaaattcagcgtgtgcaggaacaactggcttcgcgcatcggcagtgatgtattgctctgcccgctgtatggcgcgttgtcgctgaacgatcagcgaaaagcgatcctcccggcaccgcaagggatgcgcaaagtggtgctggcgaccaatattgctgaaaccagtttaaccattgaaggtattcgtctggtggtggattgtgcccaggaaagggtggcgcgttttgatccgcgaacagggcttacgcggttgattactcagcgaatcagtcaggcgtcgatgacgcagcgtgccgggcgcgccgggcgtctggagccgggtatctgcctgcatttaatcgccaaagaacaagcagaacgcgctaccgcgcaaagtgaaccggagatcttacaaagcgatctttccggtttgctgatggaattactgcaatggggatgcagcgatccggcgcagatgagctggctggatcaaccgccaacggtgaatctactggccgcgaaacgtctgttacaaatgctgggggcgctggacggtgaacggcttagtgcgcaagggcaaaaaatggcagcgctgggtaacgatccgcgtttagcggcaatgctggttagcgcaaagagcgacgacgaagctgctaccgcggcaaaaattgccgccattctcgaagagccgccacggatgggcaatagtgacctgggcgtggcgttttcgcgcaatcaaccagcctggcagcaacgtagtcagcaactgttaaaacgcttaaacgtacgcggcggtgaggcagacagttcgcttatcgcgccgctacttgccggggcgtttgccgatcgcattgctcgccgccgtgggcaagatggacgctatcaactggcaaacggcatgggggcgatgcttgatgccgacgacgcgctaagtcgccacgaatggttgatcgcgccgttattattgcagggcagcgcctcgccggatgcgcggattttactggcgttaccggtcgatattgatgaattagtacaacgctgtccgcagctggtgcagcaatctgacaccgtggaatgggatgacgcgcaaggtacgctgaaagcctggcgtcggctgcaaatcggtcagttgacggtgaaagtgcagccgttggcgaaaccgtcagaagacgagttgcatcaggcgatgcttaacggcatccgtgataaaggtttaagcgtgctcaactggacggcggaagcggaacagctacgcttgcgtttgttatgcgccggaaagtggttgccagaatatgactggccagcggttgatgatgaaagtttgttggcgacgctggaaacgtggctgctgccacatatggccggtgtacattcactacgcggcctgaaatcactcgacatttatcaggcactacgcggattacttgattggggaatgcagcaacgtctggatagtgaattgcctgcgcattacactgtgccgacgggaagccggatcgccattcgttatcatgaagataacccgcccgcgctggcggtgagaatgcaggagatgtttggtgaggccactaatccgacgatcgcccaggggcgcgtgccgctggtgctggaattgctttcacccgcccaaaggccgctgcaaatcacgcgtgatttgggggccttctggaaaggggcgtatcgtgaggtgcaaaaggagatgaaagggcgttatcccaaacacgtctggccggacgacccggcaaacacggcaccgacgcgacggacgaaaaagtattcgtaa

SEQ ID NO: 7 - DNA, 2535 bp, Escherichia coli
atggccgggaatgaccgcgagccaattggacgcaaagggaaaccgacgcgtccggtcaaacaaaaggtaagccgtcgtcgttacgaagatgacgatgattacgacgattatgatgactatgaggatgaagaaccgatgccgcgcaaaggtaagggcaaaggcaaagggcgtaagcctcgtggcaaacgcggctggctatggctgctgttaaaactggctatcgtttttgccgtgctgatcgccatttacggcgtttatctcgatcaaaaaattcgtagccgtattgatggcaaggtctggcaactgcctgcggcagtttatggtcgaatggtcaaccttgagccagacatgaccatcagcaagaacgagatggtgaagctgctggaggcaacacagtatcgtcaggtgtcgaaaatgacccgtcctggcgaatttaccgtgcaggccaacagcattgagatgattcgccgtccgtttgatttcccggacagtaaagaagggcaggtgcgcgcgcgtctgacctttgatggcgatcatctggcgaccatcgtcaatatggagaacaaccgtcagttcggtttcttccgtcttgatccgcgtctgatcaccatgatctcctcaccaaacggtgagcagcgtttgtttgtgccgcgcagtggtttcccggatttgctggtggatactttgctggcgacagaagaccgccatttctacgagcatgatggaatcagtctctactccatcggacgtgcggtgctggcaaacctgaccgcaggtcgcacggtgcagggggcgagtacgctgacgcaacagctggtgaaaaacctgttcctctccagcgagcgctcttattggcgtaaagcgaatgaagcctacatggcgctgatcatggacgcgcgttacagcaaagaccgtattcttgagctgtatatgaacgaggtgtatctcggtcagagcggcgacaacgaaatccgcggcttcccgctggcgagcttgtattactttggtcgcccggtagaagaattgagcctcgatcagcaggcgctgttagtcggtatggtgaaaggagcgtccatctacaacccgtggcgtaacccgaaactggcgctggagcgacgtaatctggtactgcgtctgctgcaacagcaacagattattgatcaagaactctatgacatgttgagtgcgcgtccgctgggggttcagccgcgcggtggggtgatctctcctcagccagcctttatgcaactggtgcgtcaggagcttcaggctaaattaggcgataaggtaaaagatctctccggcgtgaagatcttcactacctttgactcggtggcccaggacgcggcagaaaaagccgccgtggaaggtattccggcactgaagaaacagcgtaagttgagcgatcttgaaactgcgattgtggtcgtcgaccgctttagtggtgaagttcgtgcgatggtcggaggttctgagccgcagtttgcgggctacaaccgtgcgatgcaggcgcgtcgttcgattggttcccttgcaaaaccagcgacttatctgacggccttaagccagccgaaaatctatcgtctgaatacgtggattgcggatgcgccaattgcgctgcgtcagccgaatggccaggtctggtcaccgcagaatgatgaccgtcgttatagcgaaagcggcagagtgatgctggtggatgcgttgacccgttcgatgaacgtgccgacggtaaatctggggatggcgctggggctgcctgcggttacggatacctggattaaactgggcgtaccgaaagatcagttgcatccggttccggcaatgctgctgggggcgttgaacttaacgccaatcgaagtggcgcaggcattccagaccatcgccagcggtggtaaccgtgcaccgctttctgcgctgcgttcggtaatcgcggaagatggcaaagtgctgtatcagagcttcccgcaggcggaacgcgctgttccggcgcaggcggcgtatctgacactatggaccatgcagcaggtggtacaacgcggtacgggtcgtcagcttggggcgaaatacccgaacctgcatctggcagggaaaacagggactaccaacaataacgtagatacctggtttgcgggcattgacggcagcacggtgaccatcacctgggtcggccgtgataacaaccagccgaccaaactgtatggagccagcggggcaatgtcgatttatcagcgttatctggctaaccagacgccaacgccgctgaatcttgttccgccagaagatattgcagatatgggcgtggactacgacggcaactttgtttgcagcggtggcatgcgtgtcttgccggtctggaccagcgatccgcaatcgctgtgccagcagagtgagatgcagcagcagccgtcaggcaatccgtttgatcagtcttctcagccgcagcaacagccgcaacagcaacctgctcagcaagagcagaaagacagcgacggtgtagccggttggattaaggatatgtttggtagtaattaa

SEQ ID NO: 8 - DNA, 798 bp, Escherichia coli
atgcaggaatacacgaatcattccgataccacttttgcactgcgtaatatctcctttcgtgtgcccgggcgcacgcttttgcatccgctgtcgttaacctttcctgccgggaaagtgaccggtctgattggtcacaacggttctggtaaatccactctgctcaaaatgcttggccgtcatcagccgccgtcggaaggggagattcttcttgatgcccagccgctggaaagctggagcagcaaagcgttcgcccgcaaagtggcttatttgccgcagcagcttcctccggcagaagggatgaccgtgcgtgaactggtggcgattggtcgttacccgtggcatggcgcactagggcgctttggtgcggcagatcgcgaaaaagttgaggaagctatctcgctggttggcttaaaaccgctggcgcatcggctggtagacagcctctctggcggcgaacgtcagcgggcgtggatcgccatgctggtggcgcaggatagccgttgtctgttgctcgacgaaccgacttcggcgttggatatcgcccaccaggttgatgtgctggcgctggtgcaccgtttaagtcaggagcgtggcctgacggtcattgccgtgctgcacgatatcaatatggctgcgcgttactgtgattatctggtcgccctgcgcggcggtgaaatgattgctcagggaacgcctgcggaaattatgcgcggcgaaaccctcgaaatgatttatggcatcccgatgggtattctgccgcatccggcgggtgctgcacctgtgagttttgtttattga

SEQ ID NO: 9 - DNA, 891 bp, Escherichia coli
atgagcggcttacctcttatttcgcgccgtcgactgttaacggcgatggcgctttctccgttgttatggcagatgaataccgcccacgcggcggctattgacccaaatcgtattgtggcgctggagtggctgccggtggaattactactggcgctcggcatcgtgccttatggcgtggcagacaccatcaactatcgactgtgggtcagcgaaccaccactacctgaatcggtgattgacgtcggtttgcgtacagaacctaacctcgaactgctgaccgaaatgaaaccgtcgtttatggtctggtcggcgggatatggtccttcgccagaaatgctggctcgtattgcgccggggcgtggatttaacttcagcgacggcaaacagccgctggcgatggcgcgtaaatcgctgacggaaatggcggatttacttaacctgcaaagcgcagcagaaacgcatttagcgcaatatgaagactttatccgcagcatgaacccccgctttgtgaagcgtggtgcgcgtccgttattgctgacgacgcttatcgatccgcgccatatgctggtcttcggtccaaacagcttgttccaggaaattcttgatgagtacggcatcccaaatgcctggcaaggggaaaccaacttctggggcagtaccgccgtcagcatcgatcgtctggcagcgtataaagacgttgatgtgctctgttttgatcacgacaacagcaaagacatggatgcgctaatggcaacgccgctgtggcaggccatgccgtttgtccgcgccggacgctttcagcgcgtacccgcagtctggttttatggtgcaactctctcggcaatgcactttgtgcgcgttctggataacgccattggaggtaaagcgtga

SEQ ID NO: 10 - DNA, 558 bp, Escherichia coli
gtgattagcgatatcagaaaagatgctgaagtacgcatggacaaatgcgtagaagcgttcaaaacccaaatcagcaaaatacgcacgggtcgtgcttctcccagcctgctggatggcattgtcgtggaatattacggcacgccgacgccgctgcgtcagctggcaagcgtaacggtagaagattcccgtactctgaaaatcaacgtgtttgatcgttcaatgtctccggccgttgaaaaagcgattatggcgtccgatcttggcctgaacccgaactctgcgggtagcgacatccgtgttccgctgccgccgctgacggaagaacgtcgtaaagatctgaccaaaatcgttcgtggtgaagcagaacaagcgcgtgttgcagtacgtaacgtgcgtcgtgacgcgaacgacaaagtgaaagcactgttgaaagataaagagatcagcgaagacgacgatcgccgttctcaggacgatgtacagaaactgactgatgctgcaatcaagaaaattgaagcggcgctggcagacaaagaagcagaactgatgcagttctga

SEQ ID NO: 11 - DNA, 3108 bp, Escherichia coli
atggtcatcggcccggcgggcagtggcaaaacgacactgctgcgcgaggggtttccgtcagacattatttatgccccggagggcgcgcgcggcacagaacaacgcctgtaccttacgccccatgtcggtaaacaggcggtgatctttgatatcgacggcacactctgcgctcccgctgatgcggatatcctgcatcgccgtctgtgggaacatgccctcggctggctgaaagaaaagcgcgcgcgccagccgctgaacgggattattctgacactcgatttacccgatctgctgaccgcagacaaacgccaccgcgagcatctgttacagacgctgcgcagccgcttacaggatatacgccagcatcttcactgccagttaccggtttacgtggtactgacccggcttgatttattacagggttttgccgccctgttccagtccctgaacagacaggatcgcgatgcgattctgggcgtcacgttcacccgccgtgcccatgaaaatgatgactggcgaacagagttgaatgctttctggcagacatgggtggatcgaatgaatctggcgttgccggatctgatggtcacccagactcacacccgcgcgtctttattcagtttttcccgccagatgcagggaagccgtgaaccgctggtgtcactgcttgagggtctgcttgacggtgaaaatatgaacgtgatgctgcgtggtgtctatctcacctcttcgcttcagcgcgggcagatggatgatatattcacccagtctgccgcccgccagtaccgactgggcaataacccactggcgtcctggcctctggtggacaccgcgccttatttcacccgcagcttgttcccgcaggcattactcgcagagcctaatctggcaacggagagccgcgcctggctgatgcgttcccgtcgccgcctgacggttttctctgccaccggcggcgtggcggcactgctgctcatcaccggctggcatcactattacaacggtaactatcagtccggcatcaccgtgcttaagcaggccaaagcctttatggatgtgccgcctccacagggggaagatgactacggcaacctgcaactgccgctgctgaacccggtacgcgatgccacactggcctatggcgactggggcgaccgcagccgtctggccgatatgggactgtaccagggacgacgtatcggaccttatgtggaacagacctatctgcaactgctggagcaacgttacctgccctcgctgtttaacgggctggttaaagcgatgaatgccgcgccgccggagagtgaagaaaaactcgcggtgctgcgcgtgatgcgaatgctggaggacaaaagcggacgtaacaatgaggtggtgaagcagtatatggcaaaacgctggagcgaaaagttccacggccagcgcgatatccaggcacaactgatgtcccatcttgactacgcgctggctcatactgactggcacgcagagcgtcaggcgggcgacggtgacgccatcagccgctggacgccatatgacaagcccgtggtatcagcacagaaagaactgagcaaactgcctgtctaccagcgggtttaccagagcctgaaaacgcgggcgctgggcgttcttcctgccgacctcaatctgcgtgaccaggtagggccaacctttgaccaggtgtttacatctgccgatgacaacaaactggttgttccacagtttcttacccgttacggcctgcaaagctattttgtaaaacagcgcgatgaactggttgaactgacggcgatggattcctgggtacttaaccttacccgcagcgtgaaatacagtgacgccgaccgcgcggaaatccagcgccagctcaccgagcagtatatcagcgactacaccgccacctggcgggccgggatggacaatctgaatatccgcaattttgagtccatcggacaactgaccggggcgctggagcaggttatcagcggcgaccagcctttgcagcgggcgctgaccgtgctgcgtgacaacacacagccaggcgtcttttctgaaaaactctctgccaaagaacgggatgaggccctggcagagccggactaccagttactcacccgtctcgggcatgagttcgccccggaaaacattaccctggcagtacagaaagacaaagaaagcacgatgcaggccgtgtatcagcaactcaccgagttgcaccgctacctgctggcaatccagaacgcgcctgtaccagggaaatcggcgctgaaagccgtgcagttacggcttgatcagaacagcagcgatccgatattcgccacccgccagatggcaaaaacgctgcctgctccgctcaaccgctgggttggcagactgactgaccaggcctggcatgtggtgatggtggaggctgtacattatatggaagtggactggcgcgacagcgtggtgaaaccgtttaacgagcaactggcaaataactatccgtttaatccgcgttctgcacaggatgcctcactggatgccttcgaacgcttctttaaaccggatggcatactggataccttctaccagcagaacctgaagctgtttatcgataatgacctgagtctggaggatggcgataacaacgtcattattcgcgaagatattattgcgcaactggaaactgcgcagaaaatccgtgacatcttcttcagcaaacagaacggtctgggaacatcctttgccgtggaaacggtatcgctttcaggcaataaacgccgcagtgtactgaaccttgacggtcagttagtcgattacagccagggccgtaactataccgcccatctggtctggcctaacaacatgcgcgaaggcaacgaaagtaagctgacgctcatcggcaccagcggcaacgcgccgcgcagtatcagcttcagcgggccgtgggcgcagttccgcctgttcggggccggacaactgaccggagtacaggatggcaactttaccgtgcgctttagcgtggacggtggcgcgatgacctaccgtgtgcataccgacacggaagataacccgttcagcggtgggttgttcagccagtttggtctgtcagacacactgtactga

SEQ ID NO: 12 - DNA, 2199 bp, Escherichia coli
atgaaatttgataaacccgcaggggaaaacccgatcgatcagctgaaggttgtcggtcgtccccatgaccgcatcgacggaccgctgaaaactaccggcacggcacgctacgcctacgaatggcatgaagaatcccccaacgccgcctatggctatatcgtcggttccgccattgccaaaggacgcctcaccgcccttgatacggacgccgcgcaaaaagcgccgggcgtactgcctgtcattaccgccagtaacgccggggcactcagtaaaggcgacaaaaacaccgccaggctgttaggcggccccactattgagcactatcatcaggccattgctctggtagtggccgagaccttcgaacaggcgcgagcggcggcctcgctggtgcaggcgcactatcgccgtaataaaggagcttactccctggcggacgaaaaacaggccgtcagtcagccgccggaagacacgcccgacaagaacgtcggtgactttgacggggctttctcctccgctgcggtgaagattgatgctacctacacgaccccggaccagagccatatggcgatggagccgcatgcctcgatggccgtctgggatggaaataagcttactctctggacctcaaatcagatgattgactggtgccgcaccgatctggcaaaaacgctgaaagtgcccgtggagaatgtgcgtattatctccccgtatatcggcggagggtttggcggcaagctgttcctgagaagcgatgcgctgctggcggccctcgccgcccgagcggtgaaacgtccggttaaagtgatgctcccccgcccctctattcccaataacaccacgcaccgccccgccacccttcagcacttgcgtatcggtgccgaccagagcgggaaaatcaccgctatctcacatgaaagctggtctggaaacctgcccggcggcacgccggaaacggcggtacagcaaagcgaattactctacgccggggcaaaccgtcataccggcctgcggctcgccacgcttgatttgccggaagggaacgccatgcgtgcgcccggcgaagcccccggtctgatggcgctcgaaatcgcgatcgacgaactggcggaaaaagcgggcatcgatcccgtcgagtttcgcatcctgaatgacactcagattgaccccgccgacccgacgcgccgcttctctcgccgtcagcttatcgagtgcttgcgcaccggagcggataaatttggttggaagcagcgcaacgccacacccggacaggtgcgcgacggggagtggctagtcggccacggcgtcgcggcgggctttcgcaataatctgctggaaaaatcgggggctcgggttcacctcgaaccaaacggcaccgttaccgtggaaacggacatgaccgacattggcaccggcagctacaccattctggcccagacggcagcggaaatgcttggcgtaccgctggagcaggttgcggttcacctcggcgattccagtttcccggtttctgcgggttctggtggacaatggggcgcgaatacctccacctccggcgtttacgccgcctgtgtgaagcttcgcgaaatgattgcctcggcagtcgggtttgatcctgagcagtcgcagtttgccgacggcaagattaccaacggtacccgaagcgccatactacatgaggccaccgcaggcggcagactgacagcggaagagagcattgaattcggaacactgagcaaggagtaccagcagtcgacctttgccgggcattttgtggaggtcggcgtgcatagcgcgacgggagaagttcgggtccggcgtatgctcgctgtgtgtgctgcaggacgcatcctgaatccgaaaactgcacgcagccaagtcattggcgcaatgactatgggcatgggcgcggcactgatggaggagctggcggtggatgaccgtttgggctacttcgttaatcacgatatggcggggtatgaggtgccggtccatgcggatatcccaaaacaggaagtgattttcctggatgataccgaccccatatcctccccgatgaaggccaaaggtgtcggtgagctgggcctgtgcggcgtgagcgcggctatcgccaacgcggtgtataacgccaccggtattcgggtacgcgattatcccatcactctggataagctgctcgataagctgccggatgtggtttaa

SEQ ID NO: 13 - DNA, 957 bp, Escherichia coli
atgaaggcgtttacctatgaacgagtgaacacccccgccgaggcggcacttagcgctcagcgcgtacccggcgcaaaatttatcgcgggcgggaccaatctgctggacctgatgaagctggaaattgaaacgcccacccaccttatcgatgtgaacgggctcgggctcgataagatcgaagtgaccgacgcgggtgggctgcgcatcggcgcactggtacggaacaccgacctggtggctcacgagcgcgtgcgtcgtgattacgcggtactctcccgcgccctgctcgctggcgcgtctggtcagttacgcaatcaggcaaccacagcaggtaatctgctccagcgcacgcgctgcccctatttttacgacaccaatcagccctgcaataagcgcctgcccgggagcggctgcgcggcgcttgaaggctttagccgtcagcacgcggtggtaggcgtaagcgaagcctgcattgccacccatccgagcgatatggcggtcgcaatgcggttgctggatgcggtggtggaaaccatcacgccggagggaaagactcgcagtatcacactggctgatttttatcacccaccggggaaaacgccgcacattgaaaccgccctgcttcccggtgagcttatcgttgcggtgacgttacctccgccgctcggcggaaaacatatctaccgtaaggtgcgcgatcgcgcctcctacacctttgccctggtatcggtcgcggcgattattcagcctgacggcagcgggcgcgtcgcgctgggcggagtagcacataagccctggcgcattgaggctgcggatgctcagctatcccagggggcgcaggccgtatatgacgcgctgttcgccagcgcccatcccaccgctgaaaacacctttaaactcctgttggcgaagcgaacgcttgcctccgtactggctgaagcgagggcacaagcatga

SEQ ID NO: 14 - DNA, 1644 bp, Escherichia coli
atgagagttaacctactgatagcgatgataatctttgcgctaatctggccagtaactgcgctcagagcggcagtgagcaaaacaacctgggcggatgcaccggcacgcgagtttgtgtttgtcgaaaacaactcagacgacaactttttcgtcactcctggcggggcgctggatccgcgcctgaccggtgccaaccgctggaccggtttaaaatacaatggttcaggaaccatctatcagcaaagcctcggctacattgataacggttacaacaccggcctttataccaactggaagtttgatatgtggctggaaaattcaccagtttcatctcctttaactggcttgcgctgcatcaactggtacgctgggtgtaatatgaccaccagtcttatcctgccgcaaaccaccgacaccagtggattttatggcgcgacggtgaccagcggcggcgcgaagtggatgcacggcatgttgtcagacgcgttttaccagtatctgcaacaaatgcccgtcggcagcagctttacaatgaccatcaatgcctgccagacctctgtgaactatgacgccagcagcggcgcacgctgtaaggatcaggcctccggcaactggtatgttcgcaacgtcacccatacgaaagcagcaaatctacggttgataaatacccactcgctggcggaagtatttatcaacagcgacggagtaccgactctgggcgaagggaacgccgactgccggacgcaaaccatcggcagccgttctggattaagttgtaagatggttaactataccctgcaaacaaacggactcagcaacacctcaatccatatattcccggcgatcgccaactcgtcgttagcctcggccgtcggggcgtacgatatgcagttcagtctgaatggcagttcatggaaaccggtgagcaatactgcctattactacaccttcaacgagatgaagagcgcagactcgatctatgttttcttctcgagcaacttctttaagcagatggtgaaccagggaatcagcgatatcaacaccaaagatctattcaactttcgctttcagaacaccacatcaccggagtctggctggtatgaattttctacctccaacacgctgattatcaaaccccgtgatttcagcatcagtattatctccgatgaatatactcagacaccgtcgcgggagggatatgtcggcagcggcgagtcggcactcgatttcggctatatcgtaaccaccagcggtaaaacagctgccgacgaagtgctgatcaaggtgaccggacccgcgcaggtgattggcgggcgctcctattgtgtcttcagctccgatgacggtaaggcgaaagtaccgttcccggcgacgctttcctttattacccgcaacggagctacaaaaacctacgatgccgggtgcgatgatagctggcgggatatgaccgatgcgctgtggttgaccacaccgtggactgatatctctggcgaagtggggcagatggataagaccacagtcaaattttcgattccaatggataacgccatttctctgcgtacggtagatgataacggctggtttggcgaagtcagcgcttcaggagaaattcatgttcaggcgacgtggcgtaacattaactaa

SEQ ID NO: 15 - DNA, 2526 bp, Escherichia coli
atgcctttacgacggttctccccaggactgaaagcccagtttgccttcggcatggtctttttgttcgttcagcccgatgccagcgctgctgacataagtgcgcagcaaataggtggggtgattattccgcaggccttcagtcaggcgcttcaggacggcatgagcgtcccgctctatattcatctcgccggtagccagggtcgccaggacgatcagcgaatcggcagcgcttttatctggttggatgatggacagctacgcatccggaaaatacagctggaagagagtgaagataacgccagtgtcagcgaacaaactcgacagcagctgatggctctggcgaacgccccgttcaatgaggcccttaccatccccctgactgacaacgcgcagctggatctcagcttgcgccaactgctgctgcagctggtggtcaagcgcgaagcgctgggcactgtactacgctcacgtagcgaagacatcgggcagtccagtgttaacaccctcagcagtaatctgagctataacttcggcatctataacaaccagttgcgtaacggcgggagcaacacatccagctatctgtcgctgaataacgttactgcactgcgcgaacatcatgtggtgctcgacggctcgctgtacgggatcggtagcggtcaacaggacagtgaattatataaagcgatgtatgaacgcgattttgccggtcaccgatttgccggtggaacgctcgacacctggaacttgcagtccttagggccgatgaccgccatttcagcagggaagatttacggcctttcctggggaaaccaggccagctccaccatcttcgacagcagccagtcagccacgccagtgatcgcctttttaccggcggcgggtgaagtacatctcacccgtgatgggcggttactaagcgttcagaacttcaccatgggcaatcatgaagtggatacccggggtctaccatacggtatttacgatgtggaagttgaggtgatcgttaacggtcgcgtgatcagcaaacgcacccagcgggtcaataagctgtttagccgggggcgcggcgtcggtgcaccactggcgtggcaggtatggggcggtagctttcatatggatcgctggtcggaaaacgggaaaaagacgcgaccagctaaagagagttggctggcaggtgcctcgacctccggctcactgagtacgcttagctgggcggcaacgggatatggatacgataatcaggcggtgggtgaaacccgtctgacgctgccgcttgggggagcgatcaacgttaacctgcaaaatatgctggccagtgacagctcatggagcagcatcggcagcatcagcgccactctaccgggaggctttagttcgctgtgggttaatcaggaaaaaacccgcattggcaatcaattgcgacgtagcgatgccgacaaccgtgctatcggcggcacactcaacctgaactcactgtggtcgaagctgggcacattcagcatcagctacaatgatgaccgccgttacaacagccattattacacggcagattactatcaaaatgtctacagcggtacctttggttcgcttggcctgcgggccggtattcagcgctataacaacggcgacagcaacgccaatacagggaaatatatcgctctcgatctctcgctaccactgggcaactggtttagcgcagggatgactcatcaaaacggctacaccatggcaaacctgtcagcacgcaagcagtttgatgaagggaccattcgcactgttggtgccaatctgtcacgagccatctccggcgataccggtgatgacaaaactctcagtggtggggcgtatgcacagttcgacgctcgctacgccagcggaacgctgaacgtcaatagcgcggcggacggctacgtcaataccaatttaaccgccaatggcagcgtcggctggcagggtaaaaacattgctgccagcgggcggactgatggcaacgctggggtgatattcaacaccgggctggaggacgacggtcagatcagcgccaaaatcaacgggcggattttcccgcttaacggcaagcgtaactatctcccgctctctccctatggaagatatgaggtggagttacagaacagcaaaaactcactcgacagttacgatatcgtcagcggtcgcaaaagtcatctgactctctatccaggcaatgtcgctgtcattgagccagaggtgaagcagatggttaccgtctccggtcgtatccgtgcggaagacggcacactgctggctaacgcacggattaacaaccatatcggccgaacccgaaccgatgaaaacggcgagtttgtcatggacgtggataagaaataccccactatcgattttcgctacagtggcaataaaacctgcgaagtggcactggaactcaaccaggcgcgcggtgccgtctgggtcggtgatgtggtctgcagcggcctctcatcgtgggcggcggtgacgcagacaggagaagagaatgagagttaa

SEQ ID NO: 16 - DNA, 669 bp, Escherichia coli
atgaaaaagcaccttctgcttctcgctctgctgttatccggaatatctccggcccaggcgctggatgtcggcgatatatcatcgtttatgaacagtgacagcagcacgctgagcaaaacgatcaaaaacagtaccgacagtggtcgccttatcaatatccgtctcgaacggctctcttcaccgcttgacgacgggcaggttatctcaatggacaagccggacgagttgctactcactcccgccagcttgctgctacccgcccaagccagcgaagtgatccgcttcttctataagggaccagcagatgaaaaagagcgctactaccgcattgtctggtttgatcaggccctcagtgatgcgcagcgcgataatgccaaccgcagcgctgtggccactgcttccgcccgcatcggcaccattctggtcgtcgccccccgccaggcaaactaccactttcagtacgccaacggcaccctgacaaatacaggaaatgcgacgctgcggatcctcgcctacggcccctgcctgaaagccgccaatggtaaagagtgtaaagagaattactacctgatgccgggcaagtcgcgtcgttttacccgcgtggacacggcggataacaaaggacgggttgcactttggcagggtgataagttcattcccgtgaaatag

SEQ ID NO: 17 - DNA, 4254 bp, Escherichia coli
atgtcacgttataaaacaggtcataaacaaccacgatttcgttattcagttctggcccgctgcgtggcgtgggcaaatatctctgttcaggttctttttccactcgctgtcacctttaccccagtaatggcggcacgtgcgcagcatgcggttcagccacggttgagcatgggaaatactacggtaactgctgataataacgtggagaaaaatgtcgcgtcgtttgccgcaaatgccgggacatttttaagcagtcagccagatagcgatgcgacacgtaattttattaccggaatggccaccgctaaagctaaccaggaaatacaggagtggctcgggaaatatggtacagcgcgcgtcaaactgaatgtcgataaagatttctcgctgaaggattcttcgctggaaatgctttatccgatttatgatacgccgacaaatatgttgttcactcagggggcaatacatcgtacagacgatcgtactcagtcaaatattggttttggctggcgtcatttttcaggaaatgactggatggcgggggtgaacacctttatcgaccatgatttatcccgtagtcatacccgcattggtgttggtgcggaatactggcgcgattatctgaaactgagcgccaatggttatattcgggcttctggctggaaaaaatcgccggatattgaggattatcaggaacgcccggcgaatggttgggatatccgcgcagagggctatttacctgcctggccgcagcttggcgcaagcctgatgtatgaacagtattatggcgatgaagtcgggctgtttggtaaagataagcgccagaaagacccgcatgctatttctgccgaggtgacctatacgccagtgcctcttctgacactgagcgccgggcataagcagggcaagagcggtgagaatgacactcgctttggcctggaagttaactaccgaattggcgaacctttggcgaaacaactcgatacggatagcattcgcgagcgtcgggtactggcaggcagccgctatgacctggttgagcgtaataacaacatcgttcttgagtaccgcaaatctgaagtgatccgtattgctctgcctgagcgtattgaaggtaagggcggtcagacactttccctggggcttgtggtcagcaaagcaactcacggactgaaaaatgtgcagtgggaagcgccgtcattactggctgaaggtggcaaaattaccggtcagggtagtcagtggcaagtaacgctcccggcttatcgtccaggcaaagacaattattatgcgatttcagcagttgcctacgataacaaaggcaatacctcaaaacgcgtgcagacagaggtggtcattaccggagctggtatgagcgccgatcgcacggcgttaacgcttgacggtcagagccgtattcaaatgcttgctaacggtaatgagcaaaaaccgctggtgctgtctctgcgcgacgccgagggccagccagtcacgggcatgaaagatcagatcaagactgaactaactttcaaaccggctggaaatattgtgactcgttccctgaaggccactaaatcacaggcaaagccaacactgggtgagttcaccgaaactgaagcaggggtgtatcagtctgtctttactaccggaacgcagtcaggtgaggcaacgattactgttagcgttgatggcatgagcaaaaccgtcactgcagaactgcgggccacgatgatggatgtggcaaactccaccctgagcgctaacgagccgtcaggtgacgtggttgctgatggtcagcaagcctatacgttgacgttgactgcggtggactccgagggtaatccggtgacgggagaagccagccgcttgcgatttgttccgcaagacactaatggtgtaaccgttggtgccatttcggaaataaaaccaggcgtttacagcgccgcggtttcttcgacccgtgccggaaacgttgttgtgcgtgctttcagcgagcagtatcagctgggcacattacaacaaacgctgaagtttgttgccgggccgcttgatgcagcacattcgtccatcaccctgaatcctgataaaccggtggttggggggacagttacggcaatctggacggtaaaagatgcctatgacaaccctgtgaccagcctcacgccggaagcgccgtcattagcgggtgccgctgctgaaggttctacggcatcgggctggacaaataatggtgatgggacgtggactgcgcagattactctcggctctacggcgggtgaattagaagttatgccgaagctaaatggacagaatgcggcagcaaatgcggcaaaagtaaccgtggtggctgatgcgttatcttcaaaccagtcgaaagtctctgtcgcagaagatcacgtaaaagccggcgaaagcacaaccgtgacgctggtggcgaaagatgcgcatggcaacgctatcagtggtcttgcgttgtcggcaagtttgacggggaccgcctctgaaggggcgaccgtttccagttggaccgaaaaaggtaacggttcctatgttgctacgttgactacaggtggaaagacgggcgagcttcgcgtcatgcctctcttcaacggccagccagcagccaccgaagccgcgcagttgacggtcatcgccggagagatgtcatcagcgaactctacgcttgttgcggacaataaggctccgaccgtcaaaacgacgacggaactcaccttcaccgtgaaggatgcgtacgggaacccggtcaccgggctgaagccagatgcaccagtgtttagcggtgccgccagcacggggagtgagcgtccttcagcaggaaactggacagagaaaggtaatggggtctacgtgtcgaccttaacgctgggatctgccgcgggtcagttgtctgtgatgccgcgagtgaacggccaaaatgccgttgctcagccactggtgctgaacgttgcaggtgacgcatctaaggctgagattcgtgatatgacagtgaaggttaataaccaactggctaatggacagtctgctaaccagataaccctgaccgttgtggacacctatggtaacccgttgcaggggcaggaagttacgctgactttaccgcagggtgtgaccagcaagacggggaatacagtaacaactaatgcggcaggtaaagcggacattgagcttatgtcaacggttgcgggagaacacaatatttccgcttcggtgaatggtgctcagaagacggtcacggtgaaattcaacgcggatgccagcaccggtcaggcaaacctgcaggtagacgccgctgctcaaaaagtggcaaacggcaaagatgcctttacgctgacggcgaacgttgaggataaaaatggtaaccctgttccagggagcctggtgacctttaatctgccccggggtgtcaagccgcttacaggcgataatgtctgggtgaaagccaacgatgaggggaaagcagagttgcaggtggtttcagtgactgccggaacgtatgagatcacggcatcggcagggaatagccagccttcgaatacgcagactataacgtttgtagccgataaggctaccgcaaccgtctccggtattgaggtgattggcaactatgcactggcggacggcaatgccaaacagacgtataaagttacggtgactgatgccaataacaacctgttgaaagatagcgaagtgacgctgactgccagcccggcaaatttagttctgactcccaatgggacggcgaaaactaatgagcaaggacaggctattttcaccgccacgaccactgtcgcagcgaaatatacactcacggcgaaagtgagtcaggccgacggtcaggaatcgacgaaaactgccgaatctaaattcgtcgcggatgatacaaatgcagtactcaccgcatcatctgatgtgacttctctggtggcggatgggatatcgactgcgaagctggaggtgacactgatgtcggcaaataaccccgttggggggaatatgtgggtcgacattaagacgccagaaggggtgacggagaaggattatcagttcctgccgtcgaaaaatgaccatttcgtgagcggaaaaatcacgcgtacatttagtaccagcaagcctggtgtctatacgttcacatttaacgccctgacgtatggcgggtacgaaatgaagccagtgacggtgaccattaccgcggtggatgccgatacggcaaagggcgaggaggcgatgaactaa

SEQ ID NO: 18 - DNA, 1428 bp, Escherichia coli
atgtcgatcaaaaccagtaatacagattttaagacacgcatccgtcagcaaattgaagatccgatcatgcgcaaagcggtggcaaacgcgcagcagcgtattggggcaaatcggcaaaaaatggtcgatgaattggggctctgggaggagtggcgcgatcgggccgcccagatacgtgatcatgttctgagtaatctcgacgcttatctgtaccagctctcagaaaaagtgacgcaaaacggcggtcacgtctattttgcaaaaaccaaagaagacgctacccgctacattttacaggttgcccaacgcaaaaatgcccggaaggtggtgaaatctaaatcgatggtgaccgaagagattggtgtcaatcatgtgttgcaggatgctggcattcaggtgattgaaaccgatttgggtgaatatattctccagctggatcaagatccgccctctcatgttgtggtcccggcaattcataaagatcgccatcagatccgtcgagtgctacacgaacgtctgggctatgaggggccggaaacgcctgaagcgatgaccttattcatccggcaaaaaatccgcgaagatttcctcagtgctgaaataggtattacgggctgtaatttcgcggtggcagagacaggttcggtatgcctggtgaccaatgaaggtaatgcgcgaatgtgtaccacgctgcctaaaacgcatattgcagtgatgggaatggagcgtattgcccccacgtttgccgaggtagatgtattgatcaccatgctggcgcgcagtgccgttggtgcacgtttgacgggatacaacacctggctgacaggacctcgcgaagcggggcacgttgatggtcctgaagagtttcatctggttattgtcgataacgggcgttctgaggtgctggcctctgaatttcgggatgtgctgcgctgtattcgctgcggggcttgtatgaatacttgtccggcatatcgccatattggcggtcatggatatggctctatttatccagggccaattggtgcggtgatttctccgctacttggcggctataaagattttaaagatttaccctacgcctgctctttatgcacagcttgtgacaacgtgtgtccggtgcgtattccgctgtcaaaactgattttgcgtcatcgtcgggtgatggctgaaaaagggatcaccgcaaaagcagagcaacgggcgataaaaatgttcgcttatgccaatagtcatccaggattgtggaaagtcgggatgatggccggtgctcatgcggcaagctggtttatcaatggcggcaaaacaccactcaaatttggcgcgattagcgactggatggaagcacgcgatcttcctgaagctgacggagagagtttccgtagttggtttaagaaacatcaggcgcaggagaaaaagaatggataa

SEQ ID NO: 19 - DNA, 1818 bp, Escherichia coli
atgatgttaaatgcatggcacctgccggtgcccccatttgttaaacaaagcaaagatcaactgctcattacactgtggctgacgggcgaagacccaccgcagcgcattatgctgcgtacagaacacgataacgaagaaatgtcagtaccaatgcataagcagcgcagtcagccgcagccaggcgtcaccgcatggcgtgcggcgattgatctctccagcggacaaccccggcggcgttacagtttcaaactgctgtggcacgatcgccagcgttggtttacaccgcagggcttcagccgaatgccgccggcacgactggagcagtttgccgtcgatgtaccggatatcggcccacaatgggctgcggatcagattttttatcagatcttccctgatcgttttgcgcgtagtcttcctcgtgaagctgaacaggatcatgtctattaccatcatgcagccggacaagagatcatcttgcgtgactgggatgaaccggtcacggcgcaggcgggcggatcaacgttctatggcggcgatctggacgggataagcgaaaaactgccgtatctgaaaaagcttggcgtgacggcgctgtatctcaatccggtgtttaaagctcccagcgtacataaatacgataccgaggattatcgccatgtcgatccgcagtttggcggtgatggggcgttgctgcgcttacgccacaatacgcagcagctgggaatgcggctggtgctggatggcgtgtttaaccacagtggcgattcccatgcctggtttgacaggcacaatcgtggcacggggggagcttgtcacaaccccgaatcgccctggcgcgactggtactcgtttagtgatgatggcacggcgctcgactggcttggctatgccagcttgccgaagctggattatcagtcggaaagtctggtgaatgaaatttatcgcggggaagacagtattgtccgccactggctgaaagcgccgtggaatatggacggctggcggctggatgtggtgcatatgctgggggaagcgggtggggcgcgcaataatttgcagcacgttgctgggatcaccgaagcggcgaaagaaacccagccggaagcgtatatagttggagagcattttggcgatgcacggcaatggttacaggccgatgtggaagatgccgccatgaactatcgcggcttcacattcccgttgtggggatttcttgccaataccgacatctcttacgatccgcagcaaattgacgctcaaacctgtatggcctggatggataattaccgcgcagggctttctcatcaacagcaattacgtatgtttaatcagctcgacagccacgatactgcgcgatttaaaacgctgctcggtcgggaggttgcgcgcctgcccctggcagtggtctggctgttcacctggcctggtgtaccgtgcatttattacggtgatgaagtgggactggatggcaaaaatgatccgttttgccgtaagccgttcccctggcaggtggaaaaacaggatatggcgttattcgcgttgtaccagcgaatgattgcgctgcgtaagaaaagtcaggcgctgcgtcgtggcggctgtcaggtgctgtatgcggaagataacgtggtggtatttgtccgcgtgctgaatcagcagcgtgtactggtggcaattaaccgtggcgaagcctgtgaagtggtgctacccgcgtcaccgtttcttaatgtcgtgcaatggcaacgcaaagaaggccatgggcaactgacagacgggattctggctttgcctgccatttcggctacggtgtggatgaactaa

SEQ ID NO: 20 - DNA, 1446 bp, Escherichia coli
atgacaatttcaaattcgaatttattgaaaccgtttattactggtactgagttgccaccttttaaagaggatgtcttttctaaaacagaagaacaatttaaaaaaagcacctatggcaaatcgcttttcatttccggaaatgaaaacttagtaaacatttcagcggaaaaaatcgatgaaataaaaaatagcaaaaatttcttttcaaacattgtaaatataataattttactcattaagcatcctgataaaattctgcccattcttcatggttgtcctgtagagtcgatcgaagtcattaagaatgcgaaacgaacgggacaatggtcatatgagatgactgataagaacgggcagagtattgaagtgtcctatattttcactgataccatagatgataaatctgatggaaaattatgcttaaaaatctgtaactcctgcaaccaaaatgattctagtacacatgaatataaaatagatcatcaacagttgaaaaatcacataaggcaacttgaggagtgggcccttcttgaaaagttttatgataacaacgcttattattctaaacgtacaaaacaattagagaagaaaattgccgatgcggggtttataacaaggaaggttaaagccgagaactttaatgtaaaagagtttaaagacgatatagcctcgatgctttgtgaacagccccccatgcgtacacaccagatttcttcatccggatacgtatctgccgataaactgcacaaactctataagacaaatttggaagacgcgcagagagatctgaaaacaacaccggttgacatcgatggtgttagtctaaaatcaataactcgggaaaaaattgcggaagaaattgcgaaaaaaactgcggaaataattgcgaaacaaaatgcgaagagcattgaggagaagaatattgaaaaaaacaagaaacaaacaaattctgaggataattttgtcttaaaattctcaccggaagaaatcaatgagatgctcctggattacagcgatgaagaacaaaaaaaattaagaccttttttcactagtgatcacatctattgtttgtttgatgcttttagtcagggtttgcataatgttgctcgtaatggcagtccacggtatgcaggtttactacgtcaaatagcatccaagtctgcgatattacaagattttgatcaacaattgttctggcgcacgtttacaggaggggtcctccatcgacatatctctgtgaagagcgagccagaaaagacagatgtatggcgattcagtagccaatttgattttccacatataaatgaaaacggagagttgtccagaacggtactcatgttcgagggggttgctgaaagcaactttaaagatatcgccaatcattccagcgaatgtttttcttaccgttgttatgccgccccgctggatgcgaatgctaaaaaatag

SEQ ID NO: 21 - DNA, 4386 bp, Escherichia coli
atgagcctgattattgatgttatttcgcgtaaaacatccgtcaaacaaacgctgattaatcctggcgacgtcacggttgttatttatgagccttccgtggtgcaggttcatgctcaggcctctgccgttgcgcgttacgtccgtgaaggaaatgacctgctgatctatatgcaggacggcacggtgatccgctgcaacggttatttcctgcaagcggcgaatacagctgaacaatcggaactggtgtttgccgatggtcaacagctaacccatatcacctttgccgatactgctgcgggtggattagcccccgtagaactgactgcccagaccactgcgattgaaagcattgcgccatttcttgataccgttgctcagaccagcgccttcccgtggggttggctggcgggggcggcggtaggtggtggcgcgcttggtgcactgctggcaagcggtggcgatggcgactcgaaaacagaagtgattaataaccctacgccacctgctgagcctggcaacgccacaccatcatttttagttaccgataatcagggcgatcagcgcggcattctagccaccaatgacatcaccgatgacaccacgccaacctttagcggcagcgggcaggcgggggcgactattcagattaaagacagtaacggcaatactattgccagtactcaggtagacaacaacggtcactggagtgtctcgttacccacgcaaagtgcaggtgaacatacctggtcagtggtgcaaattgtcggcagtaccatcactgacgccggttcgataacgttaaccatcgacaatagtcaggccagcgtgcaggttgccaccaccgcaggcgataacattattaacgccagcgaacaggccgccgggtttacgctttctggcaccagtagccatctggcgcagggaacagaactcaccgttacgctaaacggcaaaacctacacgaccagcgtaggcgctaacggtgcctggagcgtgcaggtgccgaccgccgatgcacaggcgttaggcgaagggaatcaggcggtgctggtcagtgggaaagacgccacaggcaatacggtcaccggcgcgcagctactaacggtcgatacccaaccgccaacgcttgccatcaacaccatcgctcaggacaacattatcagtgctgcggaacataacgtcgcgctggtactgagcggcacgtcgaatgcagaagcggggcaaaccgtaacactgaccgtcaacgggaaaagccatacagcaaccgtcggtagcgacggaacctggcaagtgacgctgcctgccacggaagtccaggcactggcggagggtaattacgctgtcaatgccagtgtcagcgatcgggcagggaacaccaccagccacagcgcgaatttcacggtagacacctcagcacccgtggtcagtgttaataccgtggcgggcgacgatattcttaataatgccgagcaggccgtcgcgcagatcatctccggacaagtcagcggtgcttctccaggcgatacggtaacggtgaaattgggcactcatgtcctgacgggcatcgtgctggcagatggcagctggaatgtggcgctggacccagcggtaacccgcacgctggatcgcggagccaatacgattttcgtcaccgtgacagatgctgcaggaaatactggcgcggcgtctcgagcaatcacgctggtcggtgtttctccgttgatcaccattaacaccgtctccggcgatgacattatcagtggcgcagaaaaaggtgcgccactgacccttaccggtagcactcaacaggctgagacaggacaaaccgtcacagtaaccctggctggacagagttttaccactaccgtgcaggccgatggctcctggagtctgacggtacctgccgccgcgatgggaaatctgcctgacggcgcggtggcgattaccgcttctgtgacggatctcagcggcaataccggcaacacttcccgcaccattaccgtcgatagccaggccccggccttaagcattgatccactgaccgctgataacatcattaacgccgccgaaagcgggcaggatctgcccatcaccggcaccaccgacgctcagccggggcagacggtgaccgttacgttaaatgggcagacgtatcagggcgtcgtgcagccagacggcacctggagcgtgactgtgcccgccgccaacgtgggcgcactggctgacggcaacgctacggtcaccgccagcgtgaacgatgtcgccggtaatccgagcagcgtttcacgcgtggcgctggtggatgccacgccgccggtggtaaccattaatccggtggcgaccgataacgtcatcaacacgccggaacatgctcaggcgcaaatcatcagcggcacggttactggcgctcaggcgggcgatatcgtcaccgtgacgctgaataatgtggattacaccacggtggtggatggttccggcaactggagtctgggcgttccggcctcggtggtcagtgggctggcggacggcagttatcctgtcagcgtctcggtaaccgacaaagccggaaacacgggcagccagtcattgaccgtcacggtcaataccgccgcgccccttatcggcattaacagcattgcgggcgatgatgtgattaacgccagcgaaaaaggggccgatctccagattaccggcaccagcgatcagcctgttaacaccgccatcaccgtgacgctgaacgggcaaaattacaccaccacgaccgacgcctccggcaactggagcgtcaccgttccggcatcggcggttacagcattaggccaggccaactatacggtaacggcggcggtgaccagcgatatcggcaacagcgccactgccagccataacgtgctggtcgacagcgcgctgcccggtgtgaccattaatccggtggcaaccgacgatattattaacgccgccgaagcgggcgtggcgcaaaccatcagcgggcaggtgactggcgcggaagatggcgacacggtaactattacgttgggtggtaatacttatacggcgacggtgggcagcaatctcacctggagcgtggacgttccagcggcagatattcaggcgctgggaaatggcgatttaacggttaatgcctcagtcaccaatcaaaacggcaacaccggcagcggcacgcgggatatcaccatcgacgccaatctgcccggcctgcgggtcgatacggtggcgggcgatgatgtggtcaatatcatcgagcacgggcaggcgctggtggtcaccggcagcagctcggggctggctgaaagcacgccgcttaccgttacgattaataatgtggaatacaccactgcggtgcaggccgatggtagctggagcgtgggcgtcacggcggcgcaggttagcgcctggcctgcggggacggttaatattgccgtttcaggggaaagtagcgccggaaactcggtgagcattacgcatccggtgacggtggatctcactccggcagcgatcaccatcaacaccatcgccacggacgatgtgattaacgccgcagaaaaaggcgctgatttaaccctttccggcaccaccactaacgtagaacccggtcaaaccgtcaccgtcacctttggcgggaaaaattacactgccagcgtagcgagcgatggtagctggactgccaccgtacccgccgccgatctggcgtcattacccgagggcagcgcctccgcactggccagcgtcagcaatatcaacggcaatagcgcctcggcggtgcacaactacagcgtcgacagcagcgcgccaaccatcattatcaataccgtcgccagcgacaatatcgtcaacgccagcgaagccgatgcgggcgtgacggtgagcggcagtaccaccgccgaagcggggcagattgttacgataacgcttaacagcccgaccgtgcagacctatcaggcaacggtgcaggcggacggcagctggagcatcaatattccggcggcagatcttgaggcattgaccgatggcagccacaccctgaccgccacggtcaatgacaaagcgggcaatccggcgagcaccacgcataatctggcggtggatctcaccgttccggtgctgaccatcaacaccattgcgggcgatgacattattaacgccaccgaacacgggcaggcgctggtgatttccggttccagcaccggcggagaagcgggggatgtcgtcaccgtcacgctaaacagtaaaacctacaccaccaccctggacgcctccggcaactggagcgtcggcgttccggcggcggatgtcacggcgcttggcagcggcccgcaaactgtcaccgccacggttaccgatgcggcaggcaacagcgacaattag

SEQ ID NO: 22 - DNA, 1017 bp, Escherichia coli
atgaaaactgtaaacgtagctttactggcactcataatttcagcaacatccagccctgttgttttagctggtgataccattgaagcggcggcaacagagctttcagccattaactctggcatgtcgcaatcggagattgagcagaagattacccgctttttagaacgcacagacaacagccccgctgcgtatacctatttgactgaacatcactacatcccttctgaaacacctgataccactcagactcccactgtccagacagatcctgacgcaggacaaaaaaccgttgccgctacaggtgatgtacagacaactgcccgttatcagagcatgatcaacgcccgacagtctgcggtaactgacgcccagcaaacgcaaattacagagcaacaggcgcagatcgtagccacacaaaaaacgctcgccgcgactggagatacgcaaaataccgcgcattatcaggaaatgattaatgccagactggcggctcaaaatgaggctaatcagcgcaccgccactgaacaagggcagaaaatgaatgcgctgacaaccgatgtggcagtacaacagcaaaatgaaaggactcaatacgataaacaaatgcaaagtctggcgcaggagtctgcccaggcacatgaacaaattgacagcctgtcacaagacgtaacccaaacgcaccaacagttaaccaacacccaaaaacgggttgcagataacagccagcaaattaacacgctcaataaccatttcagttcgctaaaaaacgaagttgatgacaatcgtaaagaagccaatgcgggaactgcatctgccatcgctatcgcctcacaaccacaggttaaaaccggtgacgtgatgatggtgtcagcgggagcgggaaccttcaacggtgaatctgcggtgtctgtcggaacatcatttaatgccggaacgcatacggtacttaaagccggtatttctgcggatacacaatctgatttcggcgcaggtgtcggcgtgggatattcgttctaa

SEQ ID NO: 23 - DNA, 687 bp, Escherichia coli
atgccagcggaaaacattgttgaagttcatcatcttaagaagtccgtcggtcagggggagcatgaactctccatcctcaccggagttgagctggttgtcaaacgtggcgagaccatcgcactggtgggcgagtcgggatcgggtaagtcaaccttgctggcgatcctcgccgggctggatgacggcagcagtggcgaagtgagtctggtgggacaaccgctacataatatggacgaagaagcgcgggcaaagttgcgcgcgaagcacgtcggctttgtttttcagtcatttatgttaattcctacccttaacgcgctggaaaacgtcgagcttccggcgctgctgcgcggtgagagtagcgcggaaagtcgtaacggagcgaaagcgttgctcgaacagttagggctgggtaaacgtctggatcatcttccggcacagctttccggcggtgaacagcaacgagtggcgctggcacgagcctttaacggtcgacctgatgtgctgtttgccgacgaacccaccggtaaccttgaccgccagacgggcgataaaattgccgacctgctgttttccctcaaccgtgagcatggcaccacgttgattatggtgacccacgacctgcaactggcggcacgctgcgaccgctgcttacggctggtgaacgggcagttgcaggaggaagcatga

SEQ ID NO: 24 - DNA, 927 bp, Escherichia coli
atgttcgatccagaaaccttgcggactttcattgcggttgctgaaacaggaagtttttcaaaagcggcagaacgattatgtaaaaccacggcgacgatcagttatcgcattaaacttctggaagagaataccggagtggcgctgttttttcgcacgactcgtagcgtaacgttgacagcggctggcgagcatctactttcccaggccagagactggctgagctggctggaaagtatgcccagcgagctgcaacaggtgaatgatggcgtggaacgccaggtgaatattgtcatcaacaacctgctctacaacccccaggccgtcgcccagttgctggcgtggctgaatgaacgttacccctttacccagtttcacatctcccgacaaatctatatgggcgtctgggactcgctattgtacgaaggtttttcactggctatcggcgtcacgggaaccgaagcgctggcaaatacctttagtcttgatcccttaggatcggtgcaatggcgatttgtcatggcggcggatcatccgctggcgaacgttgaagagccgctaacagaagcgcagttgcggcgctttccggcggtcaatattgaagacagcgcccgcaccttaaccaaacgcgtcgcctggcgattgccagggcaaaaagagattattgttcctgatatggaaacgaaaatcgccgcccatctggcgggcgttggcattggttttttgccaaaatcgctttgccagtcaatgatcgataatcaacaactggtcagccgggtaatcccaacgatgcgccctccttcgccattgagtctggcatggcgcaaatttggcagcggcaaagcggtagaagatattgtgaccttgtttacccagcgcaggccggaaatcagcggatttttagaaattttcggcaacccacgcagttaa

SEQ ID NO: 25 - DNA, 2610 bp, Escherichia coli
atgaaaatacccactactacggatattccgcagaggtatacctggtgtctggccggaatttgttattcatctcttgccattttaccctcctttttaagctatgcggaaagttatttcaacccggcatttttattagagaatggcacattcgttgctgatttatcgcgctttgagagaggtaatcatcaacctgcgggcgtgtatcgggtggatctctggcgtaatgatgagttcattggttcacaggatatcgtatttgaatcgacaacagaaaatacaggtgataaatcaggtgggttaatgccctgttttaaccaggtactccttgaacgaattggccttaatagcagtgcatttcccgagttagcccagcagcaaaacaataaatgcatcaatttactgaaagctgtacctgatgccacaattaactttgattttgcagcgatgcgcctgaacatcactattcctcagatagcgttgttgagtagcgctcacggttacattccgcctgaagagtgggatgaaggtattcctgctttactcctgaattataatttcaccggtaacagaggtaatggtaacgatagctatttttttagtgagctcagcgggattaatattggcccgtggcgtttacgcaacaatggttcctggaactattttcgcggaaatggatatcattcagaacagtggaataatattggcacctgggtacagcgcgccattattccgctgaaaagtgaactggtaatgggagacggcaatacaggaagtgatattttcgatggtgttggatttcgtggtgtacggctttattcttccgataatatgtatcctgatagccagcaagggtttgccccaacggtacgtgggattgcccgtacggcggcccagctaacgattcggcaaaatggttttattatctatcaaagctatgtttcccccggcgcttttgaaattacagatttgcacccgacatcttcaaatggcgatctggacgtcaccatcgacgaacgcgatggcaatcagcagaattacactattccgtattcaacagtgccaattttacaacgcgaagggcgtttcaaatttgacctgacggcgggcgattttcgtagcggtaatagtcagcaatcatcgcctttcttttttcagggcacggcactcggcggtttaccacaggaatttactgcctacggcgggacgcaattatctgccaattacaccgcctttttattagggctggggcgcaacctcgggaactggggcgcagtgtcgctggatgtgacccatgcgcgcagtcagttagccgacgacagtcgtcatgagggggattccattcgcttcctctatgcgaaatcgatgaacaccttcggcaccaattttcagttaatgggttaccgctattcgacacaaggtttttatacccttgatgatgttgcgtatcgtcgaatggaggggtacgaatatgattacgattatgacggtgagcatcgggatgaaccgataatcgtgaattaccacaatttacgctttagccgtaaagaccgtttgcagttaaatatttcacaatcacttaatgactttggctcgctttatatctctggtacccatcaaaaatactggaatacttcggattcagatacctggtatcaggtggggtataccagcagctgggttggcatcagttattcactctcattttcgtggaatgaatctgtagggatccccgataacgaacgtattgtcggacttaatgtttcagtgcctttcaatgttctgaccaaacgtcgctacacccgggaaaatgcgctcgaccgcgcttatgcctcctttaacgccaaccgtaacagcaacgggcaaaatagctggctggcaggtgtaggtgggaccttactggaaggccacaacctgagttatcacgtaagccagggtgatacctcgaataatgggtatacgggcagcgccacggcaaactggcaggccgcttacggtacgctgggggtcgggtataactacgaccgcgatcaacatgacgttaactggcagctgtctggcggtgtggtcggacatgaaaatggcataacgctgagccagcctttaggggataccaatgttttgattaaagcgcctggcgcaggcggtgtacgcattgaaaatcaaactggcattttaaccgactggcgcggctatgcggtgatgccgtatgccacggtttatcggtataaccgtatcgcgcttgataccaatacgatggggaattccatcgatgttgaaaaaaatattagcagcgttgtgccgacgcaaggcgcgttggttcgtgccaattttgatacccgcataggcgtgcgggcgctcattaccgttacccagggcggaaaaccggtgccgtttggatcactggtacgggaaaacagtaccggaataaccagtatggtgggtgatgacgggcaagtttatttaagtggtgcgccattgtctggtgaattactggttcagtggggagacggcgcgaactcacgctgcattgcgcactatgtattgccgaagcaaagcttacagcaagccgtcactgttatttcggcagtttgcacacatcctggctcataa

SEQ ID NO: 26 - DNA, 2973 bp, Escherichia coli
atgaaggagaataaccttaatcgcgtcatcggatggtctggtttactgctgacgtctttattgagtaccagcgcactcgcagacaatatcggcaccagcgcagaagagctggggctgagcgattatcgccattttgttatttatccccgtctcgataaggcgctgaaggcacagaaaaataacgacgaagcaaccgccatccgcgaatttgaatatatacaccagcaggtgccggataatattccgctgactttataccttgcggaagcctatcgccattttggtcatgatgaccgggcacggctgttgcttgaggatcaactgaaacgtcacccaggagatgcccgacttgagcgcagtctggcggctattccggttgaagtgaaaagcattacaactgttgaagaactgcttgcccagcaaaaagcgtgcgatgctgcgccgaccctgcgttgtcgcagtgaagtcgggcagaatgccctgcggctggcacagttacctgtcgccagagcgcaactgaacgacgcgacgtttgctgcatcgccggaaggaaaaacgctgcgaaccgatctgctgcaacgggcaatctacctgaaacaatggtcccaggcagatacgctatacaatgaagcacgccagcagaacacattaagcgcggcagaacgccgtcagtggtttgacgtgcttcttgccgggcagctggacgatcggatcctggcactgcaatcacaggggatcttcaccgatcctcagtcatatattacttacgcgaccgcgctggcttatcgtggcgaaaaagcacgcctccagcattatctcattgaaaataagccgctgtttaccacggacgcacaagagaaaagttggctctatctgttatctaaatacagcgccaaccccgttcaggcattggcgaattatacggtgcagtttgccgataaccgccagtatgttgttggcgcgacgctaccggtgctgttaaaagaaggtcagtacgacgcagcgcaaaaactgctcgccaccctccccgccaatgaaatgcttgaggagcgttatgctgtcagcgtggcgacccgtaacaaggctgaagctctgcgtctggcacgcttgctgtatcagcaagaatcggcaaatcttacccgcctggatcaactaacctggcaactgatgcagaacgagcagtcacgggaagctgccgatttattgctgcaacgctatcctttccagggcgatgcgcgtatcagccagactttaatggcgcgactggcgtctctgctggaaagtcatccttacctggcaacgccggcgaaggtggcgattttatcgaaacccttaccgctggcggagcaacgtcagtggcaaagtcagttgccgggtattgcagataattgcccggcaatagttcgcttgctgggcgatatgtcgccttcctacgatgccgccgcctggaaccgtctggcaaagtgttatcgggacacgctacccggtgtggcgttgtatgcatggcttcaggccgaacaacgacaaccgaacgcctggcaacatcgtgcggtagcctatcaggcgtatcaggttgaggactacgccaccgcactggcggccaggcagaaaatcagtcttcacgacatgagcaatgaggatctgcttgctgctgccaataccgcccaggcggcaggaaatggtgcggctcgcgatcgctggctacaacaggcagaacaacgtggactgggaagcaatgccctctactggtggctgcatgcgcaacgttacattcctggtcagccggaactcgcactgaacgatctcacgcgctcaatcaatattgcgccttctgccaacgcttacgttgcgcgggcgacaatttatcgccaacgtcataatgtcccggccgcggtgagtgatttgcgcgccgcgctggaactggaaccgaataatagcaacacccaggcagcgcttggttacgccttgtgggatagcggtgatatcgcacagtcgcgggaaatgctcgaacaggcgcataaagggctaccggacgatccggcactgatccgacaactggcctatgtgaaccagcgtctggatgacatgcctgcgacgcagcactacgcccggctggtgattgatgacattgataatcaggcgctgataaccccactgaccccagagcaaaatcagcaacgcttcaatttccgccgtctgcatgaggaggtcggtcgccgctggacgttcagtttcgattcttccatcggcttgcgttccggggcaatgagtaccgctaacaataatgttggcggcgcagcgccagggaaaagctatcgtagctacgggcaactggaagccgaataccgcatcggacgcaatatgctgctggaaggcgacctgctctcagtttatagccgcttctttgccgataccggagaaaacggggtgatgatgccggtgaaaaatccgatgtccggcaccggtctgcgctggaagccgctgcgcgatcagatctttttcctcgccgtcgaacagcagttgccgctgaacgggcaaaatggcgcatccgataccatgctgcgcgccagcgcctcattctttaatggcggcaaatacagcgacgaatggcacccgaacggttcaggctggtttgcccaaaacctgtacctcgatgcggcgcaatatatccgccaggatattcaggcgtggacggcagattatcgcgtcagctggcatcagaaggtagctaacggacagactattgagccttacgctcacgttcaggacaacggctatcgtgataaaggcactcagggcgcgcagcttggcggtgtcggggtccgctggaatatctggaccggcgagacgcactacgacgcctggccgcacaaagtcagtctcggcgtcgagtatcaacatacctttaaggcgattaatcaacgtaacggagagcgcaacaacgcgtttctcaccattggagtgcactggtaa

SEQ ID NO: 27 - DNA, 1137 bp, Escherichia coli
atggaacttaaaaaattgatggaacatatttctattatccctgattacagacaagcctggaaagtggaacataaattatcggatattctactgttgactatttgtgccgtcatttctggtgcagaaggctgggaagatatagaggatttaggggaaacacatctcaattttttgaagcaatatggtgattttgaaaatggtattcctgttcacgataccattgccagagttgtatcctgtatcagtcctgcaaaatttcacgagtgctttattaactggatgcgtgactgccattcttcagatgataaagacgtcattgcaattgatggaaaaacgctccggcactcttatgacaagagtcgccgcaggagagcgattcatgtcattagtgcgttctcaacaatgcacagtctggtcatcggacagatcaagacggatgagaaatctaatgagattacagctatcccagaacttcttaacatgctggatattaaaggaaaaatcatcacaactgatgcgatgggttgccagaaagatattgcagagaagatacaaaaacagggaggtgattatttattcgcggtaaaaggaaaccaggggcggctaaataaagcctttgaggaaaaatttccgctgaaagaattaaataatccagagcatgacagttacgcaatgagtgaaaagagtcacggcagagaagaaatccgtcttcatattgtttgcgatgtccctgatgaacttattgatttcacgtttgaatggaaagggctgaagaaattatgcgtggcagtctcctttcggtccataatagcagaacaaaagaaagagtcagaaatgacggtcagatattatatcagttctgctgatttaaccgcagagaagttcgccacagcaatccgaaaccactggcacgtggagaataagctgcactggcgtctggacgtggtagtgaatgaagacgactgcaaaataagaagaggaaatgcagcagaattattttcagggatacggcacattgctattaatattttgacgaatgataaggtattcaaggcagggttaagacgtaagatgcgaaaagcagccatggacagaaactatctggcgtcagtctttgcggggagcgggctttcgtaa

SEQ ID NO: 28 - DNA, 4851 bp, Escherichia coli
atgagtgaaggaccaggcgggccacagggagcgaccgcaggcggtacgctggcaatgcggatgctgtcgcagcgggcgatggccgccagccagatgaaacgggcagccaacgacaaagccattgcacagatgttggcatcaaaaaagtctggcccccccgccgccaggctgggcgatgaaattcagcacaagagttttttgggggcgctggcaggggccgtgctgggggcgatagtgaccatagcagaaggttgcctgattatggccgcctgtgccaccggcccttatgcgctggttctggtgcctgcgctgatgtatgccagctataaggcgagtgattatgtggaggagaaacagaaccagcttgaatcatggataaacagcttttgtgacacggacggcgccatcaataccggttctaaaaatgtaaaaattaacggaaagccagcagcccgtgcagccgtcacccttccccctcctcccccacctggagcaatacctgaagtcccacagggggaaccctcatggggtgatattgccactgacctgcttgaatcggcagcggaaaaagcagtaccactggcgaaggcctgggggaacgctgttatcaccctgacggacagcaatgccggttttatggatcgcgtcagcgccggcgcatcgcttctgtttcccgccggtccggtattaatggagtttgccaccatggtgggcgggcgtggcgaaatcaaaaaagatgtggatttcccggaagccggtgaggacacggcgctctgcgacaaggagaacaaaccaccgaggatagcccagggcagcagcaacgtctttatcaacaatcagcctgccgcgcgcaagggcgacaaactggagtgcagcgcggcaatcgtggaaggttcgccggacgtctttattgggggtgagcaggtcacctatctggatatccagccggagttcccgccatggcagagaatgatcctgggaggaataacgatagccagctatcttctgccgccagcaggactgctgggaaaactggggaatctggcgaaactgggcaaactgggaaacctgctggggaaaagcggtaagctgctgggcgcaaagctcggcgcgttgctggggaaaacaggtaattcgttaaaaagtattgccaataaagtcatcagatgggtaacagatcctgtcgatccggtaaccggcgcatactgcgacgaacgtaccgactttacgctgggccagacactccccctctccttcacccgtttccacagttctgtactgccgctgcatggcctgacgggcgtgggctggagcgactcctggagcgaatacgcctgggtgcgtgaacagggaaaccgggtggatgtcatcagcctgggagccacgctgaacttcgccttcgacggtgaaagtgatacggcggttaacccgtatcacgcccagtacattctgcgccgccgtgatgattatctggagctgttcgacagggatgcactgagcagccgcttcttttatgacgcctttccgggaatgcgtctgcgccacccggtgactgacgataccagcgatgaccgcctggcacacagccccgcagaccggatgtacatgctgggcgggatgagcgacaccgccagcaaccgcatcacgtttgagcgcgacacccagtaccggatcacgggtgtcagtcacaccgacgggatccggcttaaactgacgtaccacgccagcggctacctgaaagccattcaccgcacggataacggcatacagacgctggcgacctacgaacaggatgcgcggctggactaccacctgttttatgagtacgacgctgcggaccggatcatccgctggtccgataacgaccagacgtggagccgtttcacctacgatgcacagggccggtgcgtgaccgtcaccggggcggagggctattacaacgccacgctggactatggtgacggctgcaccaccgtgacggacggcaagggcattcaccgttattactatgatcctgacggcaatattctgcgggaagaagcgccggacggcagcaccaccacgtatgaatgggatgaattccatcacctgctggcccgccactcccctgccgggcgggtggagaagtttgaatacaacgccgcacacggtcagttaagccgttacacggcggcagacggcgcggattggcagtactgctatgatgagcgcggcctgctcagcaacatcaccgcccctgccgggcagacgtggacgcagcagtgtgatgaacgcggcctgccggtgagtctggtatcgccacagggcgaagagacccggctggcgtacacccctcaggggctgctgtcggggatattccgccaggatgaacggcgtctgggcatagagtacgaccaccacaactggccggaaacactcaccgacgtgatgggccgcgaacaccacaccgaatacagcggtcacgacctgccggtgaagatgcgcggccccggcggtcagtcagtgcggttgcagtggcagcagcaccataaactgagtggccttgagcgggcaggaaccggcgcggaaggattccgctacgaccgccacggcaacctgctggcgtacacggacggtaacggcgttgtctggacaatggagtacggcccgtttgatttgccggtggcgcgaacggacggtgaaggccaccgctggcagtaccgctacgataaagacacgctgcaactgacagaagtcattaacccgcagggcgagtcttatctttatattctggacaactgtggccgggtgacggaagaacgtgactggggcggcgtggtctgtcgttaccgttatgacgctgatggcctgtgtaccgccagggtcaacggcctggaggaaaccatcctctacagccgggatgccgcaggccgcctggcagaagtcatcactccggaaggcaaaacgcagtatgcgtatgacaaatccggcaggctgacgggtatcttcagcccggacggcacatcacagcgcaccggctatgatgaacgcgggcgggtgaatgtcaccactcagggccgacgggccattgaataccactaccccgacgaacacaccgtcatccgctgtatcctgccaccggaagatgaacgcgacagacaccccgacggatccctgctgaaaaccacataccgctacaacgccgccggagaactgacggaggttatcctgccgggggatgagacgctgacgttcagccgtgatgaggcgggacgtgaagtgctccggcacagtaaccggggttttgcctgtgaacagggctggaatgcagccggtcagcctgtcagccagcgcgccggacttttcccggcggaagccacatggggcggactgctcccttcactgctacgggaataccgttacgacagcgcgggtaacgtatcaggcgtcaccagccgggaagattacggacgggaaacacaccgggagtaccggcttgaccggaacggccaggtcacggcggtgacagcctcaggcaccgggctgggctatggcgaaggcgacgagacttatggctatgacagctgcggctacctgaaggcgcagtctgcgggcagacaccggataagcggagagactgaccagtatgccgcaggccaccggctgaaacaggccggaaacacacagtatgactatgacgccgcaggccggatggtcagccgcacaaaacaccgtgacggctaccgcccagaaacagagcggttccggtgggacagccgggaccagctgaccgggtatcgcagcgcacagggggagcagtgggaataccgccacgacgccagcggcagacggacggaaaaacgctgcgaccggaagaaaatccgttttacgtacctgtgggacggcgacagtattgcggaaatccgggaataccgcgatgataaactgtacagcgtaaggcacctggtgtttaacggctttgagctgataagccagcagttcagccgggtacgacagccgcatccgtccgtggccccgcagtgggtgacgcgaacgaatcatgcggtgagcgacctgacgggccgcccgctgatgctctttaacagtgaaggtaaaaccgtctggcggccggggcagaccagcctgtgggggctggcactcagcctgcccgcagacacagactacccggacccgcgcggggagcgggacccggaagcggaccccggcctgctgtatgcgggacagtggcaggatgcagaatcggggctgtgctataaccggttccggtactacgagccggaaaccgggatgtacctggtgagtgatccgctggggttgcagggaggggagcagacttatcggtatgtgccgaatccttgtgggtatatcgatcctttggggctggctatatgtcagttagcccgctggacgaaatgggggagtgagcaaagcaacatatctgatgttttgaactcattagggaatagagcacttaaatatgctaatggtgattggataaaatcagaggctgcattcaataaatacataaacatgataaataaaagactagaattaacaggtagtaaatttagagttgagattcaaccagccataaaaaatggagagcgagttcctgcgacaacgaatggaccatttaaagtaaatggtaagtggacatccggcactcattatacaggtggttccaaacgtctagatgccggtattattgatatcacatctcctacaaaccaatatggattacatccagttattgaaggatttgatataacacttaataaaacaaaaccatcagcagtggatatatattcagatgtgtttggtgggattgatattaacgactttcggttataa

SEQ ID NO: 29 - DNA, 1671 bp, Escherichia coli
atggataatgcagaactcgccattggtatcgatctcggtactaccaatagtttaattgccgtctggaaagacggtgccgcgcaattaattccaaataagttcggtgaatatttaacaccatccataattagcatggatgaaaataatcatattttagtcggaaaaccggctgtatcacggcgtacttcgcatccggataaaacggcagcgttatttaaacgtgcaatgggcagtaataccaactggcggttaggcagcgacacatttaacgcgccagaactgtcctctttggtattacgctcattaaaagaagatgccgaagaatttctgcaacgtccgattaaagatgtggtgatctctgttccggcttatttcagcgatgaacaacgcaagcatacccgtttagcagcggagttagccggtttaaatgcggtacgcttaattaatgaacccacagcagctgcgatggcgtatggcctgcatacccaacaaaatacccgttcgctggtgtttgatctcggtggcggcacgtttgacgtcacggtgcttgagtacgccacgccggtgattgaagttcacgcctccgctggcgacaacttcctcggtggcgaagattttacccatatgctggtcgatgaggttttaaaacgcgcggatgtcgccaggaccacgcttaacgagagtgaactggcagccttgtatgcctgtgtggaagcggcaaaatgtagcaatcaatcgccaatacacattcgctggcagtaccaggatgaaacgcgggaatgcgaattttacgagaacgaactggaagatttgtggttgccgctgctcaatcgcttgcgagtgccgattgaacaggcgttgcgcgatgcgcgtctgaagccgagtcaaatcgacagtctggtgctggttggcggcgcgtcacaaatgccgctggtgcagcgaatcgccgtgcgtctgtttggcaaattaccgtatcaaagttacgatccgagcaccattgtcgcgctgggcgcagcaatccaggcagcctgccgcttacgcagtgaagatattgaagaagtgatcctcactgatatttgcccttactcgttgggcgttgaggttaaccgccagggcgtttccggcattttctcgccgattattgaacgaaacaccactgtgcccgtgtcgcgtgtagaaacttattcaaccatgcacccggaacaggattctattacggttaacgtctatcagggagaaaaccacaaagttaaaaacaacattctggtggaatccttcgatgtgccgttgaagagaaccggggcttatcagtcgattgatattcgctttagttatgatatcaacggtttgcttgaagttgacgtgcttctggaagacggcagcgttaagtccagagtgattaaccacagcccggtaacattgagcgcgcagcagattgaagagagtcggacgcggttatccgcattgaaaatttatccgcgcgatatgctcatcaaccgcacctttaaggccaaactggaagagttgtgggcgcgggcgctgggtgacgagcgagaagagattggccgggtgatcaccgattttgatgcggcgctgcagtcaaacgatatggcccgcgtcgatgaggtcaggcggcaggcgagcgtttatttagccattgagatcccataa

SEQ ID NO: 30 - DNA, 522 bp, Escherichia coli
atgcaactgaacaaagtgctgaaagggctgatgattgctctgcctgttatggcaattgcggcatgttcttccaacaagaacgccagcaatgacggcagcgaaggcatgctgggtgccggcactggtatggatgcgaacggcggcaacggcaacatgtcttccgaagagcaggctcgtctgcaaatgcaacagctgcagcagaacaacatcgtttacttcgatctggacaagtacgatatccgttctgacttcgctcaaatgctggatgcacatgcaaacttcctgcgtagcaacccgtcttacaaagtcaccgtagaaggtcacgcggacgaacgtggtactccggaatacaacatctccctgggtgaacgtcgtgcgaacgccgttaagatgtacctgcagggtaaaggcgtttctgcagaccagatctccatcgtttcttacggtaaagaaaaacctgcagtactgggtcatgacgaagcggcatactccaaaaaccgtcgtgcggtactggtttactaa

SEQ ID NO: 31 - DNA, 498 bp, Escherichia coli
atgtcgccatcattacgcaaggctgttgctgctgctattggtggtggggctgctgccatagcgtctgtgctcatcactggtccgagtggtgacgatggcctggaaggtgtcagctacataccatacgaagatatcgttggcgtatggactgtatgtcacggacacaccggaaaagacatcattcccggtaaaacgtataccgaagcagaatgcaaagccctcctgaataaagaccttgccacggtcgccagacaaattaacccgtacatcaaagtcgatataccggaaacaacgcgcggcgctctttactcgttcgtttacaacgtgggcgctggtaatttcagaacatcgacgcttcttcgcaaaataaaccagggtgatatcaaaggcgcatgtgatcagctacggcgctggacatacgctggcggtaagcaatggaaagggctgatgactcgccgcgagattgagcgtgaagtctgtttgtgggggcaacaatga

SEQ ID NO: 32 - DNA, 756 bp, Escherichia coli
atggcaacggttaataaacaagccattgcagcggcatttggtcgggcagccgcgcactatgagcaacacgcagagttacagcgccagagtgctgatgtcttactggcaatgctcccacagcgtaaatacccccacgtactggacgcggggtgtgggcctggctggatgagccgccactggcgagagcgtcacgcgcaggtgacggcgttagatctctcgccgccaatgcttgcgcaagcccgccagaaagatgctgcagaccattatctggcgggagatatcgaatccctgccgttagcgactgcgacgttcgatcttgcatggagcaatctcgcggtgcagtggtgcggtaatttatcaacggcactccgcgagctgtatcgggtggtgcgccccggaggcgtggtcgcgtttaccacgctggtgcagggatcgttacccgaactgcatcaggcgtggcaggcggtggacgagcgcccgcatgctaatcgctttttaccgccagatgaaatcgaacagtcgctgaacggcgtgcattatcaacatcgtattcagcccatcacactatggtttgatgatgcgctcagtgccatgcgttcgctgaaaggcatcggtgccacgcatcttcatgaagggcgcgaccagcgaatattaacgcgttcacagttgcagcgattgcaactggcctggccgcaacaacaggggcgatatcctctgacgtatcatctttttttgggagtgattgttcgtgagtaa

SEQ ID NO: 33 - DNA, 1752 bp, Escherichia coli
gtgacgaggcaggacatgaatgatgccgttatcacgctgaacggcctggaaaaacgctttccgggcatggacaagcccgccgtcgcgccgctcgattgcaccattcatgccggttatgtgacggggctggtagggccagacggtgcgggtaaaaccacgctgatgcggatgctggcgggattactgaaacccgacagcggcaatgccacggtgattggctttgatccgatcaaaaacgacggcgcgctgcacgccgtgctcggctatatgccgcagaaattcggcctgtatgaagatctgacggtgatggagaacctcaatctgtacgcggatttgcgcagcgtcaccggcgaggcacggaagcagacttttgctcgcctgctggagtttacgtctcttggcccgtttaccggacgcctggcgggcaagctctccggtgggatgaaacaaaaactcggcctggcctgtaccctggtgggcgaaccgaaagtgttgctgctcgatgaacccggcgtcggcgttgaccctatctcacggcgcgaactgtggcagatggtgcatgagctggcgggcgaagggatgttaatcctctggagtacctcgtatctcgacgaagccgagcagtgccgtgacgtgttactgatgaacgaaggcgagttgctgtatcagggagaaccaaaagccctgacacaaaccatggccggacgcagctttctgatgaccagtccacacgagggcaaccgcaaactgttgcaacgcgccttgaaactgccgcaggtcagcgacggcatgattcaggggaaatcggtacgtctgatcctcaaaaaagaggccacaccagacgatattcgccatgccgacgggatgccggaaatcaacatcaacgaaactacgccgcgttttgaagatgcgtttattgatttgctgggcggtgccggaacctcagaatcgccgctgggtgcaatattgcatacggtagaaggcacacccggcgagacggtgatcgaagcgaaagaactgaccaagaaatttggtgattttgccgccaccgatcacgtcaactttgccgttaaacgcggggagatttttggtttgctggggccaaacggcgcgggcaaatcgaccacctttaagatgatgtgcggtttgctggtgccgacttccggccaggcgctggtgctggggatggatctgaaagagagttccggtaaagcgcgccagcatctcggctatatggcgcaaaaattttcgctctacggcaacctgacggtcgaacagaatttacgctttttctctggtgtgtatggcttacgcggtcgggcgcagaacgaaaaaatctcccgtatgagcgaggcatttggcctgaaaagtattgcctcacacgccaccgatgaactgccattaggttttaaacagcggctggcgctggcctgttcgctgatgcatgaaccggatattctgtttctcgacgaaccgacttccggcgttgaccccctcacccgccgtgaattctggctgcacatcaacagcatggtagagaaaggcgtcacggtgatggtcaccacccactttatggatgaagcggaatattgcgaccgcatcggcctggtgtaccgcgggaaattaatcgccagcggcacgccggacgatttgaaagcacagtcggctaacgatgagcaacccgatcccaccatggagcaagcctttattcagttgatccacgactgggataaggagcatagcaatgagtaa

SEQ ID NO: 34 - DNA, 261 bp, Escherichia coli
atgaaaactatcaatactgttgttgctgctatggctctttcagctctgtcatttggcgtgtttgccgcggaaccggtaacggcatcccaggcacagaacatgaataaaatcggcgtggtttctgccgatggcgcatccaccctcgatgccctggaagcgaaactggctgagaaagcggcggcagccggtgccagtggatatagcatcacttccgccaccaacaacaataaattaagcggtactgcggtaatttataagtaa

SEQ ID NO: 35 - DNA, 2283 bp, Escherichia coli
atggaaaacaatcgcaatttccctgccagacaatttcattcgctcacgttctttgccggtctttgtattggcatcacgcctgtggctcaggcactcgccgccgaagggcaaactaacgcggatgacacgctggttgtcgaagcatcaacgccttcgctttatgcgccacaacaatctgccgatccgaaattctcgcgtccggtagcggatactacccgcacgatgacggtgatttctgaacaagtgattaaagatcagggcgcaaccaaccttaccgatgcgctcaaaaacgtccccggcgtgggtgcgttttttgcgggtgagaacggtaactccaccactggcgacgccatttatatgcgcggtgctgatacctctaacagtatttatattgatggcattcgcgatatcggcagcgtctcgcgcgacaccttcaatactgagcaggtcgaagtgattaaagggccttccggcaccgactacgggcgcagcgcgccgacgggctcgatcaatatgatcagcaagcagccgcgcaatgattccggcattgacgcctccgccagtattggcagcgcctggttccgccgcggcacgctggacgtcaatcaggtcattggtgataccactgcggtgcgcctgaatgtgatgggcgaaaaaacgcacgatgccggacgcgacaaagtcaaaaatgagcgttacggcgtcgccccttctatcgcttttggccttggtacagcgaatcgtttgtatcttaattatctgcatgtcacccagcacaacacgccagacggcggcattccaaccatcggtttgccgggctattctgccccatctgcaggaacggcgaccctgaatcattccggaaaagttgatacgcataacttttacggcacggattccgattacgacgattcgaccaccgacaccgccaccatgcgttttgagcacgatatcaacgataacaccaccattcgcaacactacccgttggtcgcgcgtgaagcaggattacctgatgacggcgattatgggtggggcgtcgaatattacccagcccaccagcgatgtgaatagctggacgtggtcacgcacggcgaataccaaagatgtgagtaataaaattctcaccaaccagaccaacctgacctcgacattctataccgcttctatcggtcatgatgtcagtaccggcgtggaatttacccgtgaaacgcagactaactacggcgttaatccggtgacgttacctgcggtaaatatttatcatcctgacagcagcattcatcccggcggcctgacgcgcaacggcgcaaacgccaatggtcagacggataccttcgcaatttacgcattcgatacgctgcaaatcacccgtgattttgagctgaacggcgggatccgtctggataattatcatactgaatatgacagtgccaccgcctgcggcggcagcggacgcggtgccatcacctgcccagctggtgtggcaaaaggttctccggtcaccaccgtcgacaccgccaagtcgggcaatctggtgaactggaaagccggggcgctgtatcacctgacggaaaacggcaatgtctatattaactatgccgtttcccagcagcctccgggcggcaacaacttcgcccttgcgcagtctggcagcggtaacagtgccaaccgcaccgattttaaaccgcaaaaagccaacaccagcgagattggcaccaaatggcaggttctggataaacgcctgttgctcaccgccgcgctgttccgtactgatatcgaaaatgaagttgagcaaaatgatgacgggacttactcgcaatacggtaagaaacgcgtcgaaggctatgagatatccgtggcagggaatatcactcccgcgtggcaggtgattggcggctatacccagcaaaaagcaaccatcaaaaacggcaaagatgttgcccaggatggttcctcatcgctgccgtataccccggagcacgccttcaccttatggagccaatatcaggcaaccgatgatatctctgttggcgcgggcgcacgctatatcggcagtatgcataaaggttcagacggcgcggtgggaacgccagcgtttaccgaaggttactgggtcgccgatgccaaactggggtatagggttaatcgcaatctcgacttccagctaaacgtctacaacctgtttgataccgattacgtcgcctcaatcaataagagcggctaccgttatcacccgggcgagccaagaaccttcttgctcacagccaatatgcatttctga

SEQ ID NO: 36 - DNA, 723 bp, Escherichia coli
atgacgccaaccattgaacttacttgtggccatcgctccattcgccatttcactgatgaacccatttccgaggcgcagcgtgaggcgattattaacagcgcccgtgcgacgtccagttccagttttttgcagtgcagtagcattattcgcattaccgacaaagcgttacgtgaagaactggtgacgctgaccggcgggcaaaaacacgtagcgcaagcggcggagttctgggtgttctgtgccgactttaaccgccatttacagatctgtccggatgctcagcttggcctggcggaacaattgctgctcggtgtcgttgatacggcaatgatggcgcagaatgcattaaccgcagcggaatcgctgggattgggcggggtatatatcggcggcctgcgcaataatattgaagcggtgacgaaactgctgaaattaccgcagcatgttctgccgctgtttgggctgtgccttggctggcctgcggataatccggatcttaagccgcgtttaccgtcctccattttggtgcatgaaaacagctatcaaccgctggataaagacgcactggcgcagtatgacgaacaactggctgaatattacctcacccgtggcagcaataatcgccgggatacctggagcgatcatatccgccgaacaatcattaaagaaagccgcccatttattctggattatttgcacaaacagggttgggcgacgcgctaa

SEQ ID NO: 37 - DNA, 1050 bp, Escherichia coli
atgcgcacgtcattttctcaacaacagtggattgatatgaaggtactggttaccggcgccaccagcggcttaggtcgaaacgcggtagagtttttatgccagaaaggcatcagcgtgcgagcgaccggtcgcaacgaggcaatgggtaaattgctggaaaaaatgggcgcagagtttgttccggcggatctgaccgagctggtctcatcacaagctaaagtgatgctcgcgggcattgatacgctgtggcactgctccagctttacctctccctgggggacacaacaggctttcgatctggctaacgttcgcgccactcgccgcctaggtgaatgggctgtcgcctggggtgtacgtaactttattcatatctcttctccctccctgtacttcgattatcaccaccatcgcgatattaaagaagattttcgccctcaccgcttcgccaacgagtttgcccgcagcaaagcggccagcgaagaagtgatcaatatgctttcgcaggcgaatccacaaacgcgctttactattctgcgcccacaaagtctgttcggaccgcacgataaagtctttatcccccgtcttgcgcatatgatgcaccactacggcagcattctgttaccgcatggcggcagtgcgctggtggatatgacctactatgaaaatgccgtgcacgccatgtggctggcaagccaggaagcctgcgataagctaccttccgggcgtgtgtacaacatcaccaacggcgagcatcgcacactgcgcagcatcgtgcagaagctgatcgacgagttgaatattgactgtcgtattcgttccgtcccttacccgatgctggatatgatcgcccgcagcatggagcgtttaggccgcaagtcagcaaaagagccgccgctgacccactacggcgtctcgaagcttaattttgactttacgctggatattacgcgggcacaggaagagttaggttatcagccggtcatcaccctggatgaaggtatcgagaaaactgccgcctggctgcgcgaccacggaaaactgccgcgctaa

SEQ ID NO: 38 - DNA, 858 bp, Escherichia coli
gtgaaagctgacaacccttttgatcttttacttcctgctgcaatggccaaagtggccgaagaggcgggtgtctataaagcaacgaaacatccgcttaagactttctatctggcgattaccgccggtgttttcatctcaatcgcattcgtcttctatatcacagcaaccactggcacaggcacaatgcccttcggcatggcaaaactggttggcggcatttgcttctctctgggactgattctttgtgttgtctgcggagccgatctctttacttccacagtgttgattgttgttgctaaggcgagtgggcgcatcacctggggtcagttggctaaaaactggctaaatgtctattttggcaacctggtcggcgcactgctgtttgtacttttaatgtggctttccggcgagtatatgaccgcaaatggtcaatggggactaaacgtcctacaaaccgccgaccacaaagtgcaccatacttttattgaggccgtctgccttggtatcctggcaaacctgatggtatgtctggcagtatggatgagttattctggccgcagcctgatggacaaagcgtttatcatggtgctgccggtcgcgatgtttgttgccagcggttttgagcacagtatcgcaaacatgtttatgatcccgatgggtattgtaatccgcgacttcgcatctccggaattctggaccgctgtcggttctgcaccggaaaatttttctcacctgaccgtgatgaacttcatcactgataacctgattccggttacgatcggtaatattatcggcggtggtttgttggttgggttgacatactgggtcatttacctgcgtgaaaacgatcaccattaa

SEQ ID NO: 39 - DNA, 2163 bp, Escherichia coli
atggcctttatgctaagtcctttgctcaaacgctatacctggaacagcgcctggctgtattacgcgcgtatttttattgcgctttgtggaaccacagcgtttccgtggtggctgggtgatgtaaaactgacgattccgctaacgctggggatggtggcagcggcgctgaccgatctcgatgaccgactggcgggacgtttgcgtaacctcatcattacgctgttctgcttttttatcgcctcggcctcagtagaattgctgtttccctggccctggctatttgcgattggcttaacgctctctaccagcggcttcattttgctcggcggtctgggtcaacgctatgcaacaattgccttcggtgcattgctgatcgccatttacactatgttgggaacatcactgtatgagcactggtatcagcagccgatgtatctgctggccggtgccgtctggtacaacgtcctgacacttattggtcatctgctgttcccggtccgcccgctgcaggacaacctggcgcgttgctatgaacaactggcgcgttatcttgagctcaagtcgcgcatgtttgatcctgatattgaagatgaaagccaggcaccgctgtacgatttggctctcgccaacggtctgctgatggcgacattgaatcagacgaaactctcgctgctgacccgcttacgtggcgatcgtggtcaacggggaacgcgtcgcacgctgcattattactttgtcgcacaggatattcacgagcgtgccagctcttctcatattcagtatcaaacattgcgtgaacattttcgccacagcgacgtgctgttccgttttcagcggctgatgtcgatgcagggccaggcgtgccagcaactgtcacgctgtattttgttgcgtcagccttatcaacatgatccgcattttgagcgcgcttttacgcatattgatgctgcgctggagcggatgcgcgataacggcgcacccgccgatttactcaaaacactgggatttttgctgaacaatttacgcgccattgatgcccaactggcaacaattgaatcagaacaggcccaggcactaccccataataatgacgaaaatgagctcgctgatgacagcccgcacgggttgagtgatatctggctgcgtcttagccgtcacttcacgccggaatccgccctcttccgtcatgcggtaagaatgtcgctggtgttgtgcttcggctacgccatcattcagataaccggaatgcatcacgggtattggatcttgctgacaagtttgtttgtctgccagccaaactataacgccacgcgccaccgcctgaagttaaggattattggtacgctggtaggtatcgccattggcattcctgtgctgtggtttgtgccatcactggaagggcagctggtgctgctggttattaccggcgtgctcttttttgccttccgtaacgtgcaatacgctcatgcaacgatgttcatcacacttttggtgctactgtgttttaacttactgggtgaaggttttgaagtagcgttacctcgcgtaatcgatacgctgattggttgtgccattgcgtgggcggcagtgagctacatctggcctgactggcagtttcgcaatctgccgcgcatgctcgaacgcgccacagaggccaactgtcggtatctcgatgccatactggagcaataccatcaggggcgtgataaccgtctggcgtatcgtattgcccgccgcgatgcacacaaccgtgatgctgagctggcgtcggtggtatcaaatatgtccagcgagccgaacgttaccccgcaaattcgcgaagccgcgtttcggttgctgtgccttaaccatacgtttaccagctatatctcagccctcggtgctcaccgggagcagttaactaatcctgaaattctggcgtttcttgatgacgcagtttgctatgttgatgacgcgttacatcatcaacctgctgatgaagaacgcgtcaatgaggcattagctagcctgaaacagcggatgcagcaacttgaaccacgggcagacagcaaagaacctctggtcgtacaacaagttggattattgattgcattactgcctgagattggtcgtctgcaacgccagattactcaagttccgcaggaaactcctgtttcggcgtaa

SEQ ID NO: 40 - DNA, 2097 bp, Escherichia coli
atgaagaagaattcttatcttttaagctgcctggccattgccgtctccagtgcctgtcatgctgaagtattaacctacccggatccgctgggttcgtcgcaatcggactttggcggcacaggattgttgcagatgccaaatgcgcgcatcgcaccggaaggtgaattcagcgtcaactaccgggataacgatcaataccgtttctactccacctccgtggcgctgttcccatggctggaaggcaccattcgttatacggatgtgcgcacacgtaaatatagccagtgggaagatttcagcggcgatcagtcatacaaagacaaatcattcgattttaaacttcgcctgtgggaagaaggttactggctaccgcaagtggcgtttggtaaacgtgatattgctggtacgggtctgtttgacggtgagtatctggtggccagcaagcaagcggggccatttgatttcaccctcgggatggcatggggctacgccggtaatgcgggcaatattaccaacccgttttgccgggtgagcgataaatattgtcatcgcgcagagtctcacgatgcgggcgatatcagctttagcgatatctttcgtggcccggcttccatctttggcggcattgagtatcaaacgccgtggaatcccctgcgtctgaaactcgaatacgacggcaacaattaccagaatgatttcgctggcaaactgcctcaggcaagccatttcaacgtcggtgcagtttatcgcgctgccagctgggcagacctcaacctgagttatgaacgcggtaacacgttgatgtttggtttcactttacggaccaatttcaacgatctgcgccctgccctgcgcgatacgccaaaaccggcatatcaacctgcgcctgaatctgaaggattgcagtacaccacggtagcaaaccaacttaccgccctgaagtataacgcgggctttgacgcgccagaaattcagctacgcgataagacgctgtatatgtctggtcagcaatacaaataccgtgactctcgtgaagcggtcgatcgtgccaaccggattctggtgaataacctgccgcaaggcgttgagaagattagcgtgacgcaaaagcgcgagcatatggcgatggtgactaccgaaaccgacgtagccagcctgcgcaaacagctggcaggtacagcgcctggtcaatcagagccactgcaacaacaacgtgttgaagctgaagatctttctgcctttggtcggggctaccgtattcgtgaagatcgctttagctactctttcaacccaacactttcacagtcgctgggcggcccggaagatttctatatgttccagctggggctgatgtccagcgcccgctactggtttaccgaccacctgctgcttgatggcggtattttcaccaatatttacaacaactacgacaagtttaagtcttcgctgttgcccgcggactctaccctgccccgcgtgcgcacgcatatccgtgattacgttcgcaatgacgtttatctcaacaacttgcaagcgaattactttgccgacttaggcaatggtttctatggccaggtgtatggcggttatctggaaacgatgtatgccggtgtcggttccgagctgctttatcgcccgctagatgccagctgggcgctgggtgtggacgttaactacgtgaagcagcgtgactgggacaacatgatgcgcttcaccgattattccacgccaactggtttcgtgacggcttactggaacccgccgacgctcaatggcgtactgatgaaacttagcgttgggcaatatctggcaaaagataaaggggcaacgatcgacgtcgccaaacgctttgacagcggcgtggcggtaggggtatgggcggcaatcagtaacgtatctaaagatgactacggcgaaggcggctttagtaaaggtttttatatctcgattccgttcgacttgatgaccattggacctaaccgcaaccgcgcggtggtttcgtggacaccattgacgcgtgatggtggacaaatgctgtcacgcaaataccagctctatccaatgacggcagagcgagaagtaccggttggacaataa

SEQ ID NO: 41 - DNA, 222 bp, Escherichia coli
atggcccagcctttccagcaatcgtcgattgttataccagtccacccacgtgagtgtggccagttccacttctgcacggtttttccagctcttacggtgtattacctccgctttgtaaagaccattgatgctctccgccatcgcgttgtcagtaagcgtaaactgaccgccgtatgtagccatcagacgaaaattggtaacttagacgcccatctgatatag

SEQ ID NO: 42 - DNA, 1053 bp, Escherichia coli
atgccagtgttacacaaccgcatttccaacgacgcgttaaaagccaaaatgttggctgagagcgaaccgcgaaccaccatttcgttttacaagtatttccacatcgccgatcctaaggcgacccgtgacgctttatatcagctgtttaccgcgctgaatgtttttgggcgagtgtatctggcgcatgagggcattaacgcgcaaatcagcgtacctgcgagcaatgttaaaacatttcgcgcgcagctctatgccttcgactcggctttagatggcttacgcctgaatatcgcgttggatgatgacgggaaatccttctgggtactgcgcatgaaggtccgcgatcgtatcgttgccgacggtattgacgatcctcactttgatgccagcaatgttggtgagtatctgcaagcggcggaagtgaacgccatgcttgacgatcccgatgcactgtttatcgacatgcgtaaccactatgagtatgaagtggggcactttgaaaacgcgctggaaattccggcagataccttccgtgagcagctgccaaaagcagtcgagatgatgcaggcacataaagataaaaaaatcgtcatgtactgcaccggcggcattcgttgtgaaaaggccagtgcctggatgaaacataacggattcaataaagtctggcatatcgagggtggaattattgaatacgcccgtaaggcgcgcgagcagggcttgccggtgcgttttattggcaaaaattttgtttttgacgagcggatgggcgaacgtatatctgatgagattatcgcgcattgccaccagtgcggtgcgccgtgcgacagccataccaactgtaaaaatgatggctgccacctgctgtttattcagtgtccagtatgtgcggaaaaatacaaaggttgttgtagtgaaatttgctgcgaagaaagcgcgttaccgccagaagaacagcgacgccgtcgggcaggacgtgaaaatggcaataagatctttaataagtctcgtggacgtctgaatacaacactgggcattcctgatccaacagaataa

SEQ ID NO: 43 - DNA, 3186 bp, Escherichia coli
atgaaaagaatgttaatcaacgcaactcagcaggaagagttgcgcgttgcccttgtagatgggcagcgtctgtatgacctggatatcgaaagtccagggcacgagcagaaaaaggcaaacatctacaaaggtaaaatcacccgcattgaaccgagtctggaagctgcttttgttgattacggcgctgaacgtcacggtttcctcccactaaaagaaattgcccgcgaatatttccctgctaactacagtgctcatggtcgtcccaacattaaagatgtgttgcgtgaaggtcaggaagtcattgttcagatcgataaagaagagcgcggcaacaaaggcgcggcattaaccacctttatcagtctggcgggtagctatctggttctgatgccgaacaacccgcgcgcgggtggcatttctcgccgtatcgaaggcgacgaccgtaccgaattaaaagaagcactggcaagccttgaactgccggaaggcatggggcttatcgtgcgcaccgctggcgtcggcaaatctgctgaggcgctgcaatgggatttaagcttccgtctgaaacactgggaagccatcaaaaaagccgctgaaagccgcccggccccgttcctgattcatcaggagagcaacgtaatcgttcgcgcattccgcgattacttacgtcaggacatcggcgaaatccttatcgataacccgaaagtgctcgaactggcacgtcagcatatcgctgcattaggtcgcccggatttcagcagcaaaatcaaactgtacaccggcgagatcccgctgttcagccactaccagatcgagtcgcagatcgagtccgccttccagcgtgaagtccgtctgccatccggtggttcgattgttatcgacagcaccgaagcgttaacggccatcgacatcaactccgcacgcgcgacccgcggcggcgatatcgaagaaaccgcgtttaacactaacctcgaagctgccgatgagattgctcgtcagctgcgcctgcgtgacctcggcggcctgattgttatcgacttcatcgacatgacgccagtacgccaccagcgtgcggtagaaaaccgtctgcgtgaagcggtgcgtcaggaccgtgcgcgtattcaaatcagccatatttctcgctttggcctgctggaaatgtcccgccagcgcctgagcccatcactgggtgaatccagtcatcacgtttgtccgcgttgttctggtactggcaccgtgcgtgacaacgaatcgctgtcgctctctattctgcgtctgatcgaagaagaagcgctgaaagagaacacccaggaagttcacgccattgttcctgtgccaatcgcttcttacctgctgaatgaaaaacgttctgcggtaaatgccattgaaactcgtcaggacggtgtgcgctgtgtaattgtgccaaacgatcagatggaaaccccgcactaccacgtgctgcgcgtgcgtaaaggggaagaaaccccaaccttaagctacatgctgccgaagctgcatgaagaagcgatggcgctgccgtctgaagaagagttcgctgaacgtaagcgtccagaacaacctgcgctggcaacctttgccatgccggatgtgccgccagcgccaacgccagctgaacctgccgcgcctgttgtagccccagcaccgaaagctgcaccggcaacaccagcaactcctgcacaacctgggctgttgagccgcttcttcggcgcactgaaagcgctgttcagcggtggtgaagaaaccaaaccgaccgagcaaccagcaccgaaagcagaagcgaaaccggaacgtcaacaggatcgtcgcaagcctcgtcagaacaaccgccgtgaccgtaatgagcgccgcgacacccgtagtgaacgtactgaaggcagcgataatcgcgaagaaaaccgtcgtaatcgtcgccaagcacagcagcagactgccgagacgcgtgagggccgtcagcaggctgaggtaacggaaaaagcgcgtaccgccgacgagcagcaagcgccgcgtcgtgaacgtagccgccgccgtaacgatgataaacgtcaggcgcaacaagaagcgaaggcgctgaatgttgaagagcaatctgttcaggaaaccgaacaggaagaacgtgtacgtccggttcagccgcgtcgtaaacagcgtcagctcaatcagaaagtgcgttacgagcaaagcgtagccgaagaaacggtagtcgcaccggtagctgaagaaactgtcgctgccgaaccaattgttcaggaagcgccagctccacgcacagaactggtgaaagtcccgctgccagtcgtagcgcaaactgcaccagaacagcaagaagagaacaatgctgataaccgtgacaacggtggcatgccgcgtcgttctcgccgctcgcctcgtcacctgcgcgtgagtggtcagcgtcgtcgtcgctatcgtgacgagcgttatccaacccaatcgccaatgccgttgaccgtagcgtgcgcgtctccggaactggcctctggcaaagtctggatccgctatccgattgtacgtccacaagatgtacaggttgaagagcagcgcgaacaggaagaagtgcaagtgcagccgatggtgactgaggtccctgtcgccgccgctgtcgaaccggttgttagcgcgccagttgttgaagaaatggctgaagtcgtagaagcccccgtaccggttgccgaaccgcaaccggaagtggttgaaacgacgcatcctgaagtgattgccgccgcggtaactgaacagccgcaggtgattaccgagtctgatgttgccgtagcccaggaagttgcagaacacgcagaaccggtggttgaaccgcaggaagagacggcagatattgaagaagttgccgaaactgctgaggttgtggttgctgaacctgaagttgttgctcaacctgccgcgccagtcgtcgctgaagtcgcagcagaagttgaaacggtaaccgcggttaaaccagagatcaccgttgagcataaccacgctaccgcgccaatgacgcgcgctccggcaccggaatatgttccggaggcaccgcgtcacagtgactggcagcgccctacttttgccttcgaaggtaaaggtgccgcaggtggtcatacggcaacgcatcatgcctctgccgctcctgcgcgtccgcaacctgttgagtaa

SEQ ID NO: 44 - DNA, 579 bp, Escherichia coli
atggccataaaaggtcttgagcaggccgttgaaaacctcagtcgtatcagcaaaacggcggtgcctggtgcgtcagcaatggccattaaccgcgttgcttcatccgcgatatcgcagtcggcgtcacaggttgcccgtgagacaagagtacgccggaaactggtaaaggaaagggccaggctgaaaagggccacggttaaaaatccgcaggccagaatcaaggttaaccggggggatttgcccgtaatcaagctgggtaacgcgcgggttgtcctgtcccgacgcaggcgtcgtaaaaaggggcagcgttcatccctgaaaggtggcggcagcgtgcttgtggtgggaaaccgtcgtattcccggcgcgtttattcagcaactgaaaaatggccggtggcatgtcatgcagcgtgtggccgggaaaaaccgttaccccattgatgtggtgaaaatcccgatggcggtgccgctgaccacggcgtttaaacagaatattgagcggatacggcgtgaacgtcttccgaaagagctgggctatgcgctgcagcatcaactgagaatggtaataaagcgatga

SEQ ID NO: 45 - DNA, 2550 bp, Escherichia coli
atggctgaaccggtaggcgatctggtcgttgatttaagtctggatgcggccagatttgacgagcagatggccagagtcaggcgtcatttttccggtacggaaagtgatgcgaaaaaaacagcggcagtcgttgaacagtcgatgagccggcaggcgctggctgcacagaaagcgggaatttccgtcgggcagtataaagccgccatgcgtatgctgcctgcgcagttcactgacgtggccacgcagcttgcaggtgggcaaagtccgtggctgatcctgctgcaacagggggggcaggtgaaggactccttcggcgggatgatccccatgttccgggggcttgccggtgcgatcaccctgccgatggtgggggccacctcgctggcggtggcgaccggtgcgctggcgtatgcctggtatcagggcaactcaaccctgtccgatttcaacaaaacgctggtcctttccggcaatcaggccgggctgacggcagatcgtatgctggtcctgtccagagccgggcaggcggcagggctgacgtttaaccagaccagcgagtcactcagcgcactggttaaggcgggggtaagcggtgaggctcagattgcgtccatcagccagagtgtggcgcgtttctcctctgcatcaggcgtggaggtggacaaggtcgctgaagccttcgggaagctgaccactgacccgacgtcggggctgacagcgatggcgcgccagttccataacgtgacggcggagcagattgcgtatgttgctcagttgcagcgttccggcgaagaagccggggcattgcaggcggcgaacgaggccgcgacgaaagggtttgatgaccagacccgccgcctgaaagagaacatgggcacgctggaaacctgggcagacaggacagcacgggcattcaaatccatgtgggatgcggtgctggatattggtcgtcctgataccgcgcaggagatgctgattaaggcagaggccgcgtttaagaaagcggacgatatctggaatctgcgcaaggatgattattttgttaacgatgaagcgcgggcgcgttactgggatgatcgtgaaaaggcccgtcttgcgcttgaagccgcccgaaagaaggctgagcagcagagtcaacaggacaaaaatgcgcagcaacagagcgataccgaagcgtcacggctgaaatataccgaagaggcgcagaaggcttacgaacgcctgcagacgccgctggagaaatataccgcccgtcaggaagaactgaataaggcactgaaagacgggaaaatcctgcaggcagattacaacacgctgatggcggcggcgaaaaaggactatgaagcgacgctgaaaaagccgaaacagtccggcgtgaaggtgtctgcgggcgatcgtcaggaagacagtgctcatgctgccctgctgacgcttcaggcagaactccggatgctggagaagcatgccggagcgaatgagaaaatcagccagcagcgccgggatttgtggaaggcagaaagtcagttcgcggtactggaggaggcggcacaacgtcgccagctgtccgcacaggagaaatccctgctggcgcataaagacgagacgctggagtacaaacgccagctggctgtacttggcgacaaggtcacctatcaggagcacctgaacgcgctggcacagcaggcggataaattcgcacagcaacaacgggcaaaacgggccgccattgatgcaaaaaaccgggggctgactgaccggcaggcagcgcgggaagccacggaacagcgcctgaaggaacagtatggcgataatcctctggcgctgaataacgtcatgtcagagcagaaaaagacctgggcagctgaagaccagcttcgcgggagctggatggcaggcctcaggtcaggctggagtgagtgggaagagagcgccacggacagtatgtcgcaggttaaaagtgctgccacgcagacctttgatggtattgcacagaatatggcggcgatgctgaccggcagtgaacagaactggcgcagcttcacccgttccgtgctgtccatgatgacagaaattctgcttaagcaggcaatggtggggattgtcggaagtataggcagcgccattggcggcggcgcatcagcgtcaggcggtacagccattcaggcagctgcggcgaaattccattttgcggccggagggtttacgggaaccggcggcaaatatgagccagcggggattgttcaccgtggtgaatttgtcttcacgaaggaggcaaccagccggattggcgtaggaaatctttaccggctgatgcgcggctatgccaccggcggttatgtcggtacaccgggcagcatggcggacagccggtcgcaggcgtccgggacgtttgagcagaataaccatgtggtgattaacaacgacggcacgaacggtcagatagggccacaggcactgaaggcggtttatgacgtagcccgtaaggcggcaatggatgttgtgaccgggcagatgcgcgatggtggtctgttctccggaggtggacgatga

SEQ ID NO: 46 - DNA, 744 bp, Escherichia coli
atgacacagacagaatcagcgattctggcgcacgcccggcgatgtgcgccagcggagtcgtgcggcttcgtggtaagcacgccggagggggaaagatatttcccctgcgtgaatatctccggtgagccggaggcgtatttccgtatgtcgccggaagactggctgcaggcagaaatgcagggtgagattgtggcgctggtccacagccaccccggtggtctgccctggctgagtgaggccgaccggcggctgcaggtgcagagtgatttgccgtggtggctggtctgccgggggacgattcataagttccgctgtgtgccgcatctcaccgggcggcgctttgagcacggggtgacggactgttacacgctgttccgggatgcttatcatctggcggggattgagatgccggattttcatcgcgaggatgactggtggcgtcacggtcagaatctctatctggataatctggaggccacagggctgtatcaggtgccgttgtcatcagcacaaccgggcgatgtgctgctgtgctgttttggttcatcggtgccgaatcatgccgccatttactgtggtgatggcgagctgctgcaccatattcctgaacaactgagcaaacgagagaggtataccgacaaatggcagcgacgcacacactccctctggcgtcaccgggcatggcgcgcatctgcctttacggggatttgcaacgatttggccgccgcatcgaccttcgtgtga

SEQ ID NO: 47 - DNA, 2916 bp, Escherichia coli
atggcagtaaagatttcaggtgtactgaaagacggcacaggaaaaccggtagagaactgcaccattcaactgaaagccagacgtaacagcgccacggtggtggtgaacacggtggcctctgaaaatccggatgaagccggtcgttacagcatggacgttgagtacggtcagtacagcgttattctgttggtggaagggttcccgccgtcacatgccgggaccatcaccgtgtatgaagattctcaacccggtacgctgaatgattttcttggtgccatgactgaggatgatgtccgtccggaggcactgcgccgttttgagctgatggtggaagaggtggcgcgtaacgcgtccgcggtggcacagaacacggcagccgcgaagaagtcagccagcgatgccagcacatcagcccgtgaggcggcaacccatgcgactgatgctgcggactcagcacgcgcagccagcacgtcagccggacaggccgcgtcgtcggctcagtcagcgtcttccagcgcaggaacggcatcaacaaaggctactgaagcatcaaaaagtgctgccgctgcagagtcctcaaaaagcgcggcggctaccagtgccggtgcggcgaaaacgtcagaaacgaatgcggcagtgtcacaacaatcagccgccacttctgcatccaccgcgaccacgaaagcgtcagaagctgcctcctcagccagggatgcgtcggcttcaaaagaggcggcaaaatcatcagaaacgagcgcagcctcgagcgccagtagtgcagcctcctcggcaacggcggcaggcaattccgcgaaggcggccaaaacgtctgagacaaacgctaagtcctctgaaacggcagcagaacagagtgcctccgcagcagcaggctcaaaaacagcggctgcattatctgccagtgccgcgtcaacaagtgccgggcaggcctcagccagtgccaccgccgccggaaaatcggcagaaagtgccgcatcgtctgcttcaacagccacaacgaaggctggcgaagccactgaacaggccagcgcagcagcgagttctgcttccgcagcgaagacatccgaaacgaacgcgaaagcgtcggaaaccagcgcagaatcctcaaaaacggctgccgcatcgtcagccagttcggcggcgtcatcggcatcatctgcgtctgcttcaaaagatgaggcgaccagacaagcgtcagcagcgaagagcagcgccacgacggcatccacgaaggcgacagaggcagctggtagtgcgacggcagcagctcagagcaaaagtacggcggaatctgcagcaacgcgcgctgagacagcggcaaaacgggcagaggatattgcatccgccgtggcgcttgaggatgcgagcacgacgaaaaaggggatagtacagctcagcagtgcgactaacagcacttccgagtcactggcggcaacgccaaaagccgttaaggccgcgtatgagctggctaacgggaaatacaccgcacaggatgcaacgacagcacagaaagggatagttcagcttagcaacgcgaccaacagcacatctgaaatgctggcggcaacgccaaagtcggtaaaggcagcctatgaccttgctaacgggaaatatactgctcaggacgctacgacagcacaaaaaggaattgtccagctcagtagtgcaaccaacagcgcatctgaaacgcttgccgcgacaccgaaagcagtgaaagcagctaatgataatgcgaatggtcgggtaccttctgcccgtaaggtgaatggtaaggcgctttcatcggatataacactgacgccgaaagatattggtacgcttaactcaacaacaatgtcattcagcggtggtgctggttggttcaaattagcaacggtaaccatgccacaggcgagttctgttgtttcaattacgttgattggtggcgcgggatttaacgtggggtcacctcaacaggcaggtatatctgaacttgttttgcgtgcaggtaatggtaatccgaaggggattactggtgctttatggcagcgcacatcgacagggtttacaaattttgcctgggtcaatacatctggtgatacttacgatatttacgttgcaatcggaaattatgcgactggtgtaaatattcaatgggattataccagtaatgccagcgtgacgattcatacgtcaccagcatattctgctaataagccggaagggttaacggacggtacagtttattcactctatacgccatcagagcagttttatccgcctggcgcaccaatcccgtggccatcagataccgttccgtctggctatgccctgatgcaggggcagacttttgacaaatctgcatacccgaaacttgcagccgcttatccgtcaggcgtgatccctgatatgcgtggctggacgattaagggcaaacctgccagtggtcgggccgtattgtctcaggaacaggacggcattaaatcgcacacccacagcgccagcgcatccagtacggatttggggacgaaaaccacatcgtcgtttgattacggcactaaatccacgaataacaccggggcgcacacgcacagtgtgagcggtacagccgcaagtgccggaaaccatactcatagtgtcacaggcgcatcagcagtcagccagtggtcacaaaatgggtcagtacataaggtagtgtctgcggccagtgtgaatacaagtgctgcaggagcgcacactcatagtgtcagcggcacagctgcatctgcaggtgctcacgcacatactgtcggtattggtgctcatacgcactctgttgcgattggctcacatggacacaccatcaccgttaacgctgcgggtaacgcggaaaacactgtcaaaaacatcgcatttaactacattgtgaggcttgcataa

SEQ ID NO: 48 - DNA, 945 bp, Escherichia coli
gtggctacgattgcattccaggggaatcttgcgggaataatgagaaagataaaaatagggctggcgctgggatctggcgcggcgagaggttggtcgcatattggcgttattaatgcgctaaaaaaagtgggtattgaaattgatatcgttgcaggatgttcaattggttcgctggtgggcgcggcctatgcatgcgatcgattatctgcgctggaagattgggtgacctctttcagttattgggatgttttacgactgatggatctctcctggcagcgcggtgggttactgcgcggcgagcgtgtcttcaatcaataccgcgaaataatgccggaaacagagatcgaaaattgttcccgtcgcttcgcggctgttgccaccaatttaagtactgggcgtgaattatggtttactgaaggcgatctccatcttgctattcgcgcatcatgcagtattccaggactaatggcacccgttgcgcataacggctactggctggttgatggggcagtcgttaacccaattcctatttcgctcacgcgtgcattgggtgctgatattgtgatagcggtcgacctgcagcacgatgctcatttgatgcaacaagatttgctctcctttaatgtcagtgaagaaaatagcgagaatggtgattctctgccgtggcatgcgcgtctgaaagaaaggttaggcagtataacgacacgtcgggcggtgacagcaccaacggcaacagagattatgaccacttctatccaggtgctggagaaccgccttaaaaggaaccgcatggcaggtgatccgcccgatattctgattcaacctgtttgcccgcaaatatctacgcttgatttccatcgcgcgcacgctgccattgcggccgggcagctggcagtggaaaagaaaatggacgaacttttgccgttggtacgcaccaacatttga

SEQ ID NO: 49 - DNA, 720 bp, Escherichia coli
atgacccttgatttacctcgccgcttcccctggccgacgttactttcggtctgcattcatggtgctgttgtggcgggtctgctctatacctcggtacatcaggttattgaactacctgcgcctgcgcagccgatttctgtcacgatggttgcgcctgctgatctcgaaccgccacaagccgttcagccgccaccggagccggtggtagagccagaaccggaacctgagccgatccccgaaccgccaaaagaagcaccggtggtcattgaaaagccgaagccgaaacctaagccaaaaccgaagccggtgaaaaaggtacaggagcagcaaaaacgcgatgtcaaacccgtagagtcgcgtccggcatcaccgtttgaaaatacggcaccggcacgcccgacatcaagtacagcaacggctgcaaccagcaagccggttaccagtgtggcttcaggaccacgcgcattaagccgtaatcagccgcagtatccggcacgagcacaggcattgcgcattgaagggcaggttaaagttaaatttgacgtcacgccggatggtcgcgtggataacgtacaaatcctctcagccaagcctgcgaacatgtttgagcgtgaggtgaaaaatgcgatgcgcagatggcgttatgagccgggtaagccaggcagtgggattgtggtgaatatcctgtttaaaattaacggcaccaccgaaattcagtaa

SEQ ID NO: 50 - DNA, 789 bp, Escherichia coli
ttgataatccgcaaaatttgcacaacactgcctgtaatacttcctgaaccagagacgatcatgaccgtaacccgcccacgcgccgaacgcggcgcatttccgcccggaacagaacattacggacgttcattattgggcgcgccgttaatctggtttccggcccctgcagccagtcgcgaaagtggtttgattctggctggcactcacggtgatgaaaactcttcggtcgtcacgctctcctgtgctctgcggactttgacaccttctttgcgccgccatcatgtggtgctgtgtgtgaatcctgacggctgccagctggggttacgggccaatgctaatggtgtggatttaaacagaaactttccggcggcgaactggaaggaaggtgaaacggtttatcgctggaacagcgccgctgaagaacgtgatgtcgtattactgacaggtgacaaacctggctccgaacctgaaacccaggcgctgtgccagcttatacaccgcattcaacctgcctgggtggtctcattccacgatccactggcctgtattgaagatcccagacacagcgaattaggcgaatggctggctcaggcgtttgaattgcctctggtaaccagcgtcggttatgaaacgcctggctctttcggcagttggtgtgcagatctgaacttgcattgcatcaccgcagagtttccgcccatctcctccgacgaagccagcgaaaaatatctctttgcgatggcaaacttgctgcgctggcatcctaaagatgcaattcgcccgtcgtga

SEQ ID NO: 51 - DNA, 1641 bp, Escherichia coli
atgaatacaactccctcacagcgattaggttttttgcatcacatcaggttggttccgttatttgcctgcattctaggcggtatcttagttctattcgcattaagttcagccctggctggctatttcctctggcaggccgatcgcgatcagcgtgatgttactgcggagattgagattcggaccgggttagcgaacagttcagattttttgcgttcagcccggatcaatatgattcaggccggggctgcgagtcgtattgcggaaatggaagcaatgaagcgaaatattgcgcaagccgaatcggagattaaacagtcgcagcaaggttatcgtgcttatcagaatcggccggtgaaaacacctgctgatgaagccctcgacactgaattaaatcaacgctttcaggcttatatcacgggtatgcaacctatgttgaaatatgccaaaaatggcatgtttgaagcgattatcaatcatgaaagtgagcagatccgaacgctggataatgcttataccgatattttgaacaaagccgttaagatacgtagcaccagagccaaccaactggcggaactggcccatcagcgcacccgcctgggcgggatgttcatgattggtgcgtttgtgcttgccctggtcatgacgctgataacatttatggtgctacgtcggatcgtcattcgtccactgcaacatgccgcacaacggattgaaaaaatcgctagtggcgatctgacgatgaaggatgaaccggcgggtcgtaatgaaatcggtcgcttaagtcgtcatttacagcaaatgcagcattcactggggatgaccgtagggactgttcgacagggtgcggaagagatttatcgtggcaccagcgaaatttcagctggcaatgcggacctgtcatctcgcaccgaagaacaagcggcggctatcgaacaaactgccgccagcatggagcaactcactgcgacggtgaaacagaatgcggataacgcgcattatgccagcaaactggcgcaagaggcttctattaaagccagcgatggcgggcagacggtttccggtgtagtaaaaacgatgggcgctatctccacgagttcgaagaaaatttctgagatcaccgccgtcatcaacagtattgctttccagacgaatattctggcactgaatgctgccgttgaagctgcgcgagcgggtgagcaagggcgtggatttgccgttgtcgccagcgaagtacggacactcgcaagccgcagcgcccaggcggcaaaagaaattgaaggcttgatcagtgaatcagtcaggttaattgacctgggatcggatgaggtggcaacggccgggaaaaccatgagcactattgttgatgccgtcgcgagtgtcacacatatcatgcaggaaattgccgccgcctcggatgagcaaagtaggggcataacgcaggttagccaggcgatttctgaaatggataaggtgacgcaacagaatgcttctctggtagaagaggcctcagcggcggcggtgtcccttgaagaacaggcggcacgattaactgaggcggtggacgtattccgtctgaacaaacaatctgtgttggcagaacctcgcggagcgggtgaaccagttagtttcgctccggtgtga

SEQ ID NO: 52 - DNA, 669 bp, Escherichia coli
atgcgtaccacatcatttgcgaaagttgcagctttatgcggcttgttggctctgtctggttgtgcctctaaaatcacccagccagataaatattctggttttttaaacaattactctgatttaaaagaaacaacctcggctacaggtaaaccggttttacgttgggtagacccgagttttgatcaaagcaaatatgacagcatcgtctggaacccaatcacttattatccggtaccgaaaccttcgacccaggtagggcagaaagttctggataaaattttgaactataccaacaccgaaatgaaagaagcgatagcgcagcgtaaaccactggttaccaccgcggggccgcgtagtctgattttccgtggggccattaccggtgtagataccagcaaagaagggctgcaattctatgaagtggttcctgttgcattagtggttgcggggacgcaaatggctacaggccaccgtaccatggatactcgcttgtattttgaaggtgagctgattgatgcagcgactaataaaccggttatcaaagtcgttcgtcagggcgaaggtaaagacctgaataacgaaagtacgccaatggctttcgaaaatattaaacaagttattgatgacatggcgaccgatgccaccatgtttgacgttaacaaaaagtag

SEQ ID NO: 53 - DNA, 537 bp, Escherichia coli
atggaaaatctcgctcgctttttatccaccacacttaaacaactacgtcagcagcgcggctggagtctttcgcgactggcagaagcgacgggcgtttctaaagcaatgttaggacagattgagcgtaatgagtccagcccgacggtcgcgacattatggaaaattgccactgggttgaacgtgccattttcgacatttatttctccgccacagtccgctacgccttcagtttatgatccacaacagcaggcgatggtgatcatttcgctgtttccttatgatccacaactctgctttgaacacttctcgattcagatggcacccggtgcaataagcgaatcgacgccccatgagaagggggtaatcgaacatgtcgtcgtcattgatggacaacttgatctgtgcgttgatggtgaatggcagacccttaattgtggggaaggcgttcgatttgctgcagacgtcacgcatatctatcgtaatggtggggagcaaaccgtacattttcattccctcatccattacccgcgcagttaa

SEQ ID NO: 54 - DNA, 1146 bp, Escherichia coli
atgagcaagacatttgcccgcagcagcctgtgtgcgctcagcatgacaataatgaccgctcacgccgccgaaccgcctaccaatttagataaaccggaagggcgactggatattatcgcctggccgggatatatcgaacgcggacaaactgataaacaatacgactgggtaacgcaattcgaaaaagagacaggctgcgcggtgaatgttaaaaccgccgcgacttccgatgagatggtcagtctgatgaccaaagggggttacgatctggttacggcatccggcgatgcctcgctgcgtttgattatgggtaaacgcgtgcagccgattaataccgccttgattcccaactggaaaacgcttgatccgcgcgtggttaaaggcgactggtttaacgttggcggcaaagtttacggcacaccttaccaatgggggccgaacctgctgatgtacaacactaaaaccttcccgacgccgccggatagctggcaagtggtttttgttgagcaaaatctgcaggacggcaagagcaataaaggccgcgttcaggcttatgatggccctatctacattgcggacgctgcgttgttcgttaaagccactcagccgcagttgggcatcagcgatccgtatcaactcaccgaagaacagtaccaggcggtgctgaaagtgctgcgtgatcaacatagtttgatccatcgctactggcatgacactaccgtgcaaatgagcgatttcaaaaacgagggtgtggtcgcttccagtgcctggccctatcagaccaacgccctgaaagccgaaggtcagcctgtcgctaccgttttcccgaaggagggcgttaccggttgggctgacaccaccatgctacatagcgaagcgaaacatccggtttgcgcctacaaatggatgaactggtcattaacgccaaaagtgcagggcgatgtggcggcctggtttggctcgttaccagtcgtgccggaagggtgtaaagccagttcgttattaggcgagaaaggttgtgaaacaaacggttttaactatttcgataaaatagccttctggaaaacgcctatagcagaagggggcaagtttgttccctacagtcgctggacgcaggattacattgccattatgggcggtcgctaa

SEQ ID NO: 55 - DNA, 1425 bp, Escherichia coli
atgcaacataagttactgattaacggagaactggttagcggcgaaggggaaaaacagcctgtctataatccggcaacgggggacgttttactggagattgccgaggcatccgcagagcaggtcgatgctgctgtgcgcgcggcagatgcagcatttgccgaatgggggcaaaccacgccgaaagtgcgtgcggaatgtctgctgaaactggctgatgttatcgaagaaaatggtcaggtttttgccgaactggagtcccgtaattgtggcaaaccgctgcatagtgcgttcaatgatgaaatcccggcgattgtcgatgtttttcgctttttcgcgggtgcggcgcgctgtctgaatggtctggcggcaggtgaatatcttgaaggtcatacttcgatgatccgtcgcgatccgttgggggtcgtggcttctatcgcaccgtggaattatccgctgatgatggcagcgtggaaactggctccggcgctggcggcagggaactgcgtagtgcttaaaccatcagaaattaccccgctgaccgcgttgaagttggcagagctggcgaaagatatcttcccggcaggcgtgattaacgtactgtttggcagaggcaaaacggtgggcgatccgctgaccggtcatcccaaagtgcggatggtgtcgctgacgggctctatcgccaccggcgagcacatcatcagccataccgcgccctccattaagcgtactcatatggaacttggtggcaaagcgccagtgattgtttttgatgatgcggatattgaagcagtggtcgaaggtgtacgtacatttggctattacaatgccggacaggattgtactgtggcttgtcggatctacgcgcaaaaaggcatttacgatacgctggtggaaaaactcggtgctgcagtggcaacgttaaaatctggtgcgccggatgacgagtctacggagcttggacctttaagctcgctggcgcatctcgaacgcgtcagcaaggcagtagaagaggcgaaagcgacagggcacatcaaagtgatcactggcggtgaaaagcgcaagggtaatggctattactatgcgccgacgctgctggctggcgcattacaggacgatgccatcgtgcaaaaagaggtatttggtccagtagtgagtgttacgctcttcgacaacgaagaacaggtggtaaactgggcgaatgacagccagtacggacttgcatcttcggtatggacgaaagatgtgggcagggcgcatcgcgtcagtgcacggctgcaatatggttgtacctgggtcaatacccatttcatgctggtaagtgaaatgccgcacggtgggcagaaactttctggttacggcaaggatatgtcactttatgggctggaggattacaccgtcgtccgccacgtcatggttaaacattaa

SEQ ID NO: 56 - DNA, 612 bp, Escherichia coli
atgcgtgactgccattcttcagatgataaagacgtcattgcaattgatggaaaaacgctccggcactcttatgacaagagtcgccgcaggggagcgattcatgtcattagtgcgttctcaacaatgcacagtctggtcatcggacagatcaagacggatgagaaatctaatgagattacagctatcccagaacttcttaacatgctggatattaaaggaaaaatcatcacaactgatgcgatgggttgccagaaagatattgcagagaagatacaaaaacagggaggtgattatttattcgcggtaaaaggaaaccaggggcggctaaataaagcctttgaggaaaaatttccgctgaaagaattaaataatccagagcatgacagttacgcaattagtgaaaagagtcacggcagagaagaaatccgtcttcatattgtttgcgatgtccctgatgaacttattgatttcacgtttgaatggaaagggctgaagaaattatgcgtggcagtctcctttcggtcgataatagcagaacagcagaacagcagaacagcagaacaaaagaaagagccaaaaaatgacggtcagatattatatcagttctgctga

SEQ ID NO: 57 - DNA, 1551 bp, Escherichia coli
atgaagagatcgatatcgtttcgtcccacattgctcgcgctcgtccttgccacaactttcccggttgcgcacgccgccgtaccgaaagatatgctggtgattggtaaggccgccgatccacaaaccctcgacccggcggtaacaatagataataacgactggacagtgacctacccgtcttatcagcgactggttcagtacaaaacggacggtgataaaggctcaaccgacgttgaaggcgatctggcaagtagctggaaagcgtctaacgatcaaaaagagtggacgttcaccctgaaagataatgctaaatttgccgatggcacacctgtcactgccgaagcagtaaaactctcttttgagcggttactaaaaatcggccaggggccagcagaagcatttcccaaagatttaaagattgatgctcccgacgaacatacggtgaagtttacccttagccagccatttgcaccgttcctctacacgctggcgaatgacggtgcatccattatcaatccggcggtattaaaggaacatgcggcggatgatgcccgcggcttcctcgcgcaaaataccgccggttccggaccatttatgctgaaaagctggcaaaaaggtcagcaattagttctggtgccaaatccgcattaccccggcaataaaccgaactttaagcgagtatcggtaaaaattatcggtgaaagtgcctcccgtcgcctgcagctctcccgtggcgacattgacattgccgatgcgctgccggtggatcaactcaacgccctgaagcaggaaaacaaagtcaatgtggcagagtatccgtcactgcgcgtcacctatctgtatctgaataacagcaaagcgccacttaatcaggcggatctgcggcgggccatttcctggtctaccgattatcagggcatggttaacggcattctgagtggtaacggaaaacaaatgcgcggcccgattccggaaggcatgtggggctacgatgcgacggcaatgcaatacaaccatgacgaaacgaaagccaaagccgaatgggataaagtgacgagcaaacccaccagcctgacgtttctctactccgataacgatccgaactgggaaccgatcgctctggcaacacaatccagcctcaacaagctgggcatcaatgtgaagctggaaaagctggcgaacgccaccatgcgcgacagagtgggtaaaggtgattacgacattgcgattggcaactggagtccggattttgccgacccgtatatgtttatgaattactggtttgagtcagacaaaaaaggtctgccgggtaaccgctcgttctatgaaaacagtgaggtcgataagttactgcgcaatgcgcttgcgaccaccgaccagacgcagcgtacccgagactaccagcaggcacagaaaatcgtcattgatgacgctgcttatgtgtacctgttccagaaaaactaccaactggcgatgaacaaagaggtgaaaggctttgtgttcaatcccatgctggaacaggtcttcaatatcaataccatgagtaaataa

SEQ ID NO: 58 - DNA, 2796 bp, Escherichia coli
atggagataattatgagaaacctctgtttcttactgacgttagtggcaactctgttgctccccgggcggctgattgccgccgccttaccgcaggatgaaaagttaattaccgggcaactggacaatggcttgcgatatatgatttatccgcatgctcatccaaaggatcaggtaaatttatggctgcaaattcataccggttcattgcaggaagaagacaatgagcgcggcgtggctcattttgtagaacatatgatgtttaacggcacaaaaacatggccgggtaataaagtcatcgaaacatttgagtcaatgggcctgcgttttggtcgcgatgttaatgcctataccagctatgacgaaacggtgtatcaggtgagtttgccaactacgcagaaacaaaatctgcaacaagtgatggcaatcttcagtgaatggagtaatgccgcaacctttgaaaaactcgaagtagacgctgaacgcggcgtaattactgaggaatggcgtgcccatcaggatgcgaaatggcgcacctctcaggcgcgccgccctttcctgctggcaaatacccgtaatttagaccgtgaacctatcggcctgatggatactgtcgccacggtcacaccggcacaattgctccaattttatcaacgctggtatcaaccaaataatatgacctttatcgtggttggcgatatcgacagtaaagaagcgctggcgctgataaaggataatttaagtaagcttccggctaacaaagcagctgaaaatcgcgtctggccgacaaaagccgaaaaccacctgcgctttaatatcattaatgataaagaaaaccgggtgaacggcatcgcactctattatcgcctgccaatggtacaagtgaacgatgagcaaagctttatcgaacaagctgaatggagcatgttagttcagctgttcaatcaacgtctgcaggaacgtatacagtcgggcgagttgaagactatttctggcggcactgcgcgcagcgttaaaattgcacccgattatcagtcgctgtttttccgtgtaaatgcacgagacgataatatgcaggatgctgcgaatgcattaatggaagagttggcaaccattgatcagcatggtttttctgctgaagaactcgatgatgtcaaatctacccgcctcacctggctgaaaaatgcggttgatcagcaagctgaacgtgatttacgtatgctgaccagtcgcctggcatccagctcattaaataatacgccgttcttgtcgccggaagagacatatcaactttcgaaacgtctgtggcagcaaattaccgtgcaaagtctggcggaaaaatggcagcagttaagaaagaaccaggacgcattttgggagcaaatggtaaacaatgaggttgccgccaaaaaagcattgtctcctgcggctatcctggcgctggaaaaggagtacgccaacaaaaagctggcggcttacatcttcccaggcagaaatttatcgttaacagtagacgctgacccacaggcggaaattagcagcaaagaaacgctggctgagaatctgacatcattaacactttccaatggtgcaagggttattctggcaaaatccgcgggtgaagagcaaaagctacaaattattgccgtatcgaataaaggcgatttaagtttccctgcgcagcaaaaatcacttatcgcgctggcaaataaagcagttagcggaagcggcgttggcgaactctcctcttccagcctgaaacgctggagtgcggaaaactcggtaaccatgagcagtaaagtcagtggcatgaatacgttgctctccgttagcgcgcggactaataaccctgaacctggttttcagttgattaaccagcgaatcacccacagcacgattaacgacaatatttgggcatcgctacaaaatgctcaaattcaggcattgaaaacgctcgaccagcgtccagcggagaaattcgcccagcagatgtatgagacgcgctatgctgatgaccgcacgaaattactgcaagaaaatcagattgcacagtttactgccgcagatgcgctggctgccgatcgccagttgttttcatctccagcggatatcacgtttgtcattgtcggtaatgtcgcagaagacaaactcgtggcgttaattacgcgttacttaggatcaatcaaacactctgattcgccattagccgcaggtaaaccattaactcgcgcgacggacaacgcatcggttactgtaaaggaacaaaatgaacctgtggcacaggtttcacagtggaagcgttatgattcccggacacctgttaatctggcgacgcgtatggcgctcgatgcttttaacgtcgcactggcaaaagatctacgcgttaatattcgtgaacaggcatctggggcatacagcgtttcttctcgcctctcggttgatcctcaggctaaagatatcagtcatttgctggcttttacttgtcaaccagaacgacatgatgaactgttaacgttagcgaatgaagtgatggttaagcgtttgactaaagggatcagtgagcaagaactgaacgaataccagcaaaacgttcagcgcagcctcgatatccaacagcgtagcgttcaacaattagcgaacactattgtaaatagtcttattcaatatgacgatcctgcagcatggactgagcaggagcaattgttgaaacaaatgacggtagagaatgttaacactgccgttaaacaatatctttctcatccggtaaatacttataccggagtattattgccaaaataa

SEQ ID NO: 59 - DNA, 207 bp, Escherichia coli
atgacgcgacaggaagaacttgccgctgcccgtgcggcactgcatgacctgatgacaggaaaacgggtggcaacggtacagaaagacggacggcgagtggagtttacgaccacttccgtgtctgacctgaaaaaatacattgctgagctggaagtgcagaccggcatgacacagcgacgcaggggacctgcaggattttatgtatga

SEQ ID NO: 60 - DNA, 1173 bp, Escherichia coli
atgttcgatttttcaaaggtcgtggatcgtcatggcacatggtgtacgcagtgggattatgtcgctgaccgtttcggcactgctgacctgttacctttcacgatttcagacatggattttgccactgccccctgcattatcgaggcgctgaatcagcgcctgatgcacggcgtgtttggctacagccgctggaagaacgatgagtttctcgcggctattgcccactggttttccacccagcattacaccgccatcgatcctcagtcggtggtgtatggcccttctgttatctatatggtctcagaactgattcgtcagtggtctgaaacaggtgaaggcgtggtgatccacacacccgcctatgacgcattttacaaggccattgaaggtaatcagcgcacagtaatgcccgttgctttagagaagcaggctgacggctggttttgcgatatgggcaagctggaagccgtgttggcgaaaccagaatgtaaaattatgctcctgtgtagcccacagaatcctaccggaaaagtgtggacgtgcgatgagctggagatcatggctgacctgtgcgagcgtcatggtgtgcgggttatttccgatgaaatccatatggatatggtttggggcgagcagccgcatattccctggagtaatgtggcgcggggagactgggcgttgctgacgtcgggatcgaaaagtttcaatattcccgcgctgaccggtgcttacgggattatagaaaatagcagcagccgtgatgcctatttatcggcactgaaaggacgtgatgggctttcttccccttcggtactggcgttaactgcccatatcgccgcctatcagcaaggtgcaccgtggctggatgccttacgcgtctatctgaaagataacctgacgtatatcgcagataaaatgaacgccgcgtttcctgaactcaactggcagatcccgcaatccacttatctggcctggcttgatttacgtccgttgaatattgacgacaacgcgttgcaaaaagcacttatcgaacaagaaaaagtcgcgatcatgccggggtatacctacggtgaagaaggtcgtggttttgtccgactcaatgccggctgcccacgttcgaaactggaaaaaggtgtggctggattaattaacgccatccgcgctgttcgctaa

SEQ ID NO: 61 - DNA, 4617 bp, Escherichia coli
atggcagataatccaaacccttcatcgcccctgccggacgtgttttcaccggcgacccgcgactggtttcttcgcgcctttaaacagccgaccgctgtccagtcgcaaacctggcatgtggcggcgcgaggcgaacatgcgctggtgattgcaccgactggctccgggaaaacgctggcagcatttctctacgccctcgatcgactcttccgcgaaggcggcgaagatacccgcgaggcgcataaacgtaaaacctcacgcatcctctatatttcaccgataaaagccctgggcaccgacgttcagcgcaacttgcagatcccgttgaagggtattgccgatgaacggcggcggcgcggcgaaacggaagtcaatcttcgcgtggggatccgtactggcgatacgcctgcacaggaacgcagcaaactcacccgtaatccgccggatattctgatcaccacacccgaatcactctatctgatgctgacctcccgcgcgcgcgaaacgctacgcggcgtcgaaacggtaattattgatgaagtccacgcggtagcgggaagtaaacgtggtgcgcatctggcgttaagtctggagcggctcgatgcgctgctccacacctcagcacagcgaattggcctttctgccactgtgcgctcagccagcgatgtggcagcatttcttggtggcgatcgcccggttacggtagtcaacccgcccgcaatgcgtcatccgcagatacggattgtcgtaccagtcgccaatatggatgatgtctcatcggtcgccagcggcactggcgaagacagccatgccggccgggaaggctccatctggccatatattgaaacgggtatccttgatgaagtgttgcgccatcgctcgaccattgtctttactaattcgcgggggctggcggaaaaactgacggcacgattaaatgagctttacgccgcacgcttacagcgttccccgtctatcgccgctgatgcggcccatttcgagtcgacctctggcgcaacctctaaccgtgtacaaagtagcgacgtttttattgcccgctcacaccacggctccgtctctaaagaacaacgagcaatcaccgagcaggcgctgaaatcgggtgagttacgctgcgtggtcgcaacttccagtctcgaactggggattgatatgggcgctgtggagctggtgattcaggtggcaacgccgctttctgttgccagtgggttacaacgcattggacgtgccggacaccagataggaggtatctccaaagggctttttttcccccgaaccaggcgtgacttagtcgattccgcagtcattgtagagtgtatgttcgcaggcaggctggaaaacctgacacctccgcataatccactcgacgtccttgcgcagcacaccgttgccgccgcggcgatggatgcattacaggtagacgaatggtactcccgcgtacgccgtgccgcaccgtggaaagatctgccaagacgtgtttttgacgccacgctggatatgctttccggacgctatccctctggcgatttttctgcttttcgccccaaactggtctggaacagggagaccgggatattgaccgcccgacctggcgctcagctgttggcggttaccagcggcggcaccattccggatcgtggcatgtatagcgtgttattacccgaaggggaagaacaggccggttcgcgacgggtgggtgaactggatgaggagatggtatatgagtcgcgggtgaacgatattatcactctcggcgcaacctcatggcggatccagcaaatcacccgcgatcaggtgattgtgactcctgctccgggtcgttctgcccggctccccttctggcgtggtgaaggtaacggacgtccggctgaattaggcgagatgatcggcgattttcttcatttgctggcggatggagcgttcttttccgggactattcccccgtggctggctgaagaaaatacgatcgccaatattcaggggttgattgacgagcagcgcaacgcgacgggtattgttccggggagtcgtcatctggtcctcgaacggtgccgtgatgaaattggcgattggcgtattattttgcactctccctatggaagacgggtgcatgaaccctgggcgctggcgattgccgggcgaatacatgcgctttggggcgctgacgcgtctgtggtcgccagtgatgacggcattgttgcgcgcattcctgacactgatggtaaattgcccgacgccgcgatttttttgtttgaaccagaaaagttgctgcaaattgtccgcgaggcggtaggcagttcggcacttttcgccgcccgttttcgcgaatgcgccgcgcgggcattattaatgccgggccgcacgccgggccatcgcaccccgctttggcaacaacggctgcgcgccagtcagttgctggaaatcgctcagggatatccggattttccggccattctcgaaaccctacgcgaatgtctgcaagatgtttatgatcttcccgcactggaacgtttgatgcgtcgcctgaacggaggcgaaattcaaatatccgatgtaacgactactacgccctcgcctttcgccacaagtttattgttcggctatgtcgcggaatttatgtaccagagcgacgccccgctggcagaacgccgggcatccgtactgtcgctggacagcgagttactgcgcaatctactcggacaggtcgatccgggggaattactcgacccgcaggtcattcgccaggtggaagaagagttgcaacgactggctcctggcagaagagcgaaaggtgaagaaggattgttcgacctgctgcgcgaactggggccaatgaccgttgaagacctggcgcaacggcatacaggcagcagtgaagagattgcctcgtatctggaaaatcttcttacagtaaaacgcatcttcccgacgatgattagtggacaggagcgtcttgcctgtatggatgatgccgccaggctgcgcgatgccctcggcgtacgattaccagagtcactgccagagatttatttgcatagagtcagttacccgcttcgcgacctctttctacgctatctccgggctcatgctctggtcacggctgaacaactggctcatgagtttagtctcggtattgccattgtcgaagagcagcttcagcaactgcgcgaacagggtctggtgatgaatctgcaacaagacatctgggtgagcgatgaagtatttcgtcgtctgcgtttgcgctcgctgcaagccgccagagaagcgacgcgtcccgttgcagccacgacctatgcgcgattgctgctggaacgtcagggcgtattacccgccaccgatggtagcccggcgctctttgcctcaacatcgccaggcgtttatgagggggtggatggcgtgatgcgggtgatcgaacagcttgccggagtcggcttacccgcctcactctgggaaagccagatcttgcctgcccgcgtacacgactattcgccagaagtgctcgatgaattactggcaaccggtgcggttatctggtcggggcaaaaaaaactgggtgaagatgacggcctggtggcactgcatctacaggaatatgctgcagaatcgttcactcccgccgaagcggatcaggcgaatcgttcggcgctgcaacaagcgatagtcgctgttctggctgacggaggagcctggtttgcacaacaaatcagccaacggatacgcgacaaaatcggcgaatcggttgatccctcggcactgcaagaggcgttatgggcgctggtctggcaaggcgtcatcaccagcgatatttgggcaccgttacgcgccctcacccgcagcagttccaacgcacgcacctcaactcgccgcagtcaccgggctcgtcgtgggcgtcctgtctatgcacaacccgtctcgccgcgggtatcttacaacacaccaaatctggctggacgctggtcgttattgcaggtggagccactaaacgataccgaaaggatgctggcgctggcggaaaatatgctcgaccgctacggcatcatcagtcgtcaggcggtgatagccgaaaatatccctggcgggtttccatcgatgcaaacgctttgtcgaagtatggaagattccgggcgaattatgcgaggtcgttttgtagaaggtctgggtggcgcgcaattcgctgaacgtctgactattgaccgcttgcgcgacctggcgacacaagccgcgcaaacgcgccactatacaccagtggcgctctccgccaacgatccggctaatgtgtggggaaatcttctgccctggcctgcacatccggcaacgctggtaccaacgcgtcgggcgggtgcgctggtggtcgtttctggcggcaaattgttactctatctggcgcaaggtggcaaaaaaatgctggtctggcaggaaaaagaggaattactcgccccagaggttttccacgcgctgactaccgcactgcgtcgcgaaccacggctgcgctttacgctaacagaagtgaatgatctaccggtctggcaaacgccgatgtttacgctgctgcgtgaagcgggattttcaagttcgccacaagggctggattggggatag

SEQ ID NO: 62 - DNA, 816 bp, Escherichia coli
gtggcgcggataaaccgtatttcgatcacgctctgtgctttactttttaccaccctgcctttaacgcctatggcccatgcttcaaagcaagccagggagagttctgctaccactcatatcaccaaaaaagcagataaaaagaaaagcacggcaaccaccaaaaagacccagaaaacagcgaaaaaagccgccagtaaaagtacgaccaaaagcaaaaccgcttcttccgttaaaaaatcttccattaccgcttctaaaaacgccaaaactcgcagcaaacataccgtcaataaaacggcctcagccagccttaccgaaaagtgtaccaaacgtaagggctataaatcgcattgtgtgaaagtcaaaaatgcagcgtcaggaacccttgccgacgcacacaaagcgaaggtgcaaaaagccacaaaagtggcaatgaataaactgatgcagcaaattggtaagccatatcgttggggtggcagctcaccgcgtaccggttttgattgcagcggcctggtttattacgcttataaagatttggtgaaaattcgtattccgcgtacggcgaatgaaatgtatcacctgcgcgatgcagcgccaatcgaacgtagtgaactgaaaaacggcgacctggtctttttccgtactcagggacgcggtacagccgatcatgtcggcgtgtatgtcggcaacggcaaatttattcagtcaccgcgcacaggtcaggaaattcaaatcacttctctcagtgaagactactggcagcgccactatgttggcgctcgccgggtaatgaccccaaaaacacttcgctaa

SEQ ID NO: 63 - DNA, 747 bp, Escherichia coli
atgttaagtattaaagatttacacgtcagcgtggaagataaagctatcctgcgtggattaagcctcgacgttcgtcccggcgaagttcacgccattatggggccaaacggttcgggcaaaagtaccttatcggcaacgcttgccgggcgagaagattatgaagtgacgggcggcacggttgagttcaaaggcaaagatttgcttgcactgtcgccggaagatcgtgcaggcgaaggcatctttatggccttccagtatccggtggagattccaggtgtcagtaaccagtttttcctgcaaacggcacttaatgcggtgcgcagctatcgcggccaggaaacgctcgaccgctttgattttcaggatttgatggaagagaaaatcgctctcctgaagatgccggaagatttattaacccgttcggtaaacgttggtttttccggcggcgagaaaaagcgcaacgatattttgcaaatggcggtgctggaaccggagttatgcattcttgatgaatcggactccgggctggatatcgacgcattaaaagtggtcgccgatggcgtgaactcgctgcgtgatggcaagcgctcattcatcattgttacgcactaccaacgcattctcgactacatcaagcctgattacgttcatgtgctatatcagggacgaattgtgaaatccggcgatttcacgttggtcaaacaactggaggagcagggttatggctggcttaccgaacagcagtaa

SEQ ID NO: 64 - DNA, 2974 bp, Escherichia coli
cggcgatacggcgacaagttatgctgatcgtctgacaatgtcgaccgacaacagtatttaccaacttctccccgatgcagtggtatttccgcgttcaaccgcagatgtggcgctgatcgcccgtcttgccgcgcaggaacgctattcatcgctgatctttaccccccgcggcggcggcaccggcactaacggtcaggcgctcaaccagggtattattgttgatatgtcccgccatatgaaccgcatcatcgaaattaaccctgaagagggctgggtgcgcgttgaggccggggtgataaaagaccaactcaatcagtacctgaaaccgttcggctacttttttgcaccagaactttcgaccagcaaccgggcaacgctcggcgggatgatcaataccgatgcatccggtcagggatcgctggtctatggcaaaacgtcagatcacgtacttggcctacgtgcggtattgttggggggcgatattctcgatacgcaacctttacccgtcgagctggcggaaacgctgggtaaatccaataccacaatcgggcgaatttataacacggtttatcaacgttgccgtcagcaacgccagttaatcatcgacaacttccccaaacttaaccgctttcttaccggttacgatctgcgtcatgtctttaacgatgagatgaccgagttcgatctgacgcgcattctgacgggttcagaagggacgctggcctttattaccgaagcgcggctggatattacgcgcttgcctaaagtgcgccgtctggtgaatgtcaaatatgactcttttgactctgcgctgcgtaacgcgccgtttatggttgaggcgcgggcgctttcggtagagacggtggactcaaaagtgctgaatctggcgcgggaagatattgtctggcattccgtcagcgagttgattaccgatgtgcctgacaaagagatgctcgggctgaacattgtggaatttgctggtgatgatgaggcgctgattgacgagcgggtaaatgcactctgtgcgcggttggatgagctgatcgccagtcatcaagcaggtgtcatcggctggcagatgtgccgtgagctggcgggggttgaacgtatctatgcaatgcgcaaaaaagccgttggtctgcttggcaatgccaaaggtgccgctaagccaattccgtttgctgaggatacctgcgtaccgccggaacatctggccgattatattgctgaatttcgcgcgctgctcgacagccacggcttaagctacggtatgttcggtcacgtcgacgcaggtgtcttgcatgtccgtccggcactggatatgtgcgatccgcaacaagagattttgatgaagcaaatctctgatgacgtggtggcgctgactgcgaaatacggtggtttgttgtggggcgagcacggcaaaggttttcgcgctgaatacagcccggcgtttttcggtgaggaactttttgcagaactgcgcaaagtgaaagcggcatttgacccgcataaccgactcaacccagggaagatttgcccgccagaaggtctcgatgcgccgatgatgaaagtggacgcggtgaagcgcggtacattcgatcggcagatccccattgcggtacgccagcagtggcgcggtgcgatggagtgtaacggcaacggtttatgcttcaactttgatgcccgtagtccgatgtgtccgtcgatgaagatcacccagaaccggattcattcaccgaaagggcgcgcaacgctggtgcgtgaatggctgcgtttgttggcggatcgcggcgttgatccactcaaactggaacaagaactgcctgaatccggcgtcagcttgcggacgttaattgcccgcacgcgcaatagctggcatgcgaataaaggcgaatatgacttctcacacgaagtcaaagaggcgatgtcgggctgtctggcctgtaaagcttgttcgacccagtgccccatcaaaattgatgtgccggagtttcgctctcgttttctgcagctctatcacacccgttatttacgcccgctgcgcgaccacctcgtcgctacggtcgagagctacgcgccgctgatggcacgcgcgccgaaaacctttaacttcttcattaaccagccgctggtgcgcaaactctcggaaaaacatatcggcatggttgatttgccgctgctgtcggtcccctcgctacaacaacaaatggtggggcatcgctcggcaaacatgacgctggaacagcttgaatctctcaatgcagagcagaaagcgcgcacagtgttggtggtgcaggacccctttaccagctattacgatgcgcaagtggtggcggattttgtccgtctggtcgaaaaattaggtttccagcctgtgttactgccattttcgccaaatggcaaagcccagcatattaaaggttttcttaatcgttttgcgaagacggcgaaaaagacggcggatttcctcaaccgtatggcgaagctgggtatgccaatggtgggcgtcgatccggcgctggtactttgttatcgcgatgaatataaactggcgctgggcgaggagcgtggcgagtttaacgtcttactggcgaatgaatggctggcaagcgcacttgagtcacagccagtggctacagtcagcggtgaatcatggtatttctttggtcactgtaccgaagttaccgccttgccgggtgcgccagcacaatgggccgcgatatttgcccgttttggcgcgaaactggaaaatgtcagcgtgggttgctgcggcatggcagggacttacggacatgaagcgaaaaaccataaaaattcgctcgggatctatgagttatcctggcatcaggctatgcagcgactgccgcgtaaccgctgtctggcgaccggatattcctgccgtagtcaggtcaaacgggttgaaggcacgggggtacgccatcctgtgcaggctttactggagattattaaatga

SEQ ID NO: 65 - DNA, 1344 bp, Escherichia coli
atggatcagacatattctctggagtcattcctcaaccatgtccaaaagcgcgacccgaatcaaaccgagttcgcgcaagccgttcgtgaagtaatgaccacactctggccttttcttgaacaaaatccaaaatatcgccagatgtcattactggagcgtctggttgaaccggagcgcgtgatccagtttcgcgtggtatgggttgatgatcgcaatcaggtacaggtcaaccgtgcatggcgtgtgcagttcagctctgccatcggcccgtacaaaggcggtatgcgcttccatccgtcagttaacctttccattcttaaattcctcggcttcgaacaaaccttcaaaaatgccctgactactctgccgatgggcggtggtaaaggcggcagcgatttcgacccgaaagggaaaagcgaaggcgaagtgatgcgtttctgccaggcgctgatgactgaactgtatcgccacctgggcgcggataccgacgttccggcaggtgatatcggggttggtggtcgtgaagtcggctttatggcggggatgatgaaaaagctctccaacaataccgcctgcgtcttcaccggtaagggcctttcatttggcggcagtcttattcgcccggaagctaccggctacggtctggtttatttcacagaagcaatgctaaaacgccacggtatgggttttgaaggcatgcgcgtttccgtttctggctccggcaacgtcgcccagtacgctatcgaaaaagcgatggaatttggtgctcgtgtgatcactgcgtcagactccagcggcactgtagttgatgaaagcggattcacgaaagagaaactggcacgtcttatcgaaatcaaatccagccgcgatggtcgagtggcagattacgccaaagaatttggtctggtctatctcgaaggccaacagccgtggtctgtaccggttgatatcgccctgccttgcgctacccagaacgaactggatgttgacgccgcgcatcagcttatcgctaatggcgttaaagccgtcgccgaaggggcaaatatgccgaccaccatcgaagcgactgaactgttccagcaggcaggcgtactatttgcaccgggtaaagcggctaatgctggtggcgtcgctacatcgggcctggaaatggcacaaaacgctgcgcgcctgggctggaaagccgagaaagttgacgcacgtttgcatcacatcatgctggatatccaccatgcctgtgttgagcatggtggtgaaggtgagcaaaccaactacgtgcagggcgcgaacattgccggttttgtgaaggttgccgatgcgatgctggcgcagggtgtgatttaa

SEQ ID NO: 66 - DNA, 747 bp, Escherichia coli
gtgaccaaactcaaacttctggcacttggagtgcttatcgcaacgtctgcaggcgtagcgcacgctgaaggtaaattttccctgggcgcaggcgtaggtgtcgttgaacacccatataaagattacgataccgatgtttacccagtaccggtaatcaactatgaaggcgataacttctggttccgtggcttaggtggtggttactacctgtggaatgacgcaacggataaactttcaattaccgcttactggtcgccgctttacttcaaagctaaagacagtggcgatcaccaaatgcgtcacctggatgaccgtaagagcaccatgatggctggtctgtcttatgctcactttacccagtacggttacctgcgtaccaccctggctggcgataccctggataacagcaacggcatcgtctgggatatggcctggttgtatcgttacaccaacggtggcctgaccgtgactccgggtattggtgtgcagtggaacagcgaaaaccagaacgaatactattatggcgtatcgcgcaaagagtccgctcgcagcggtctgcgtggctataactcgaacgacagctggagcccttacctggagctgagcgccagctacaacttcctcggcgactggagtgtttacggtaccgcgcgctacacccgtctgtctgatgaagttactgacagcccgattgtggataaatcctggactggcctgatttctaccgggatcacctacaaattctga

SEQ ID NO: 67 - DNA, 972 bp, Escherichia coli
gtgaccattgctattgttataggcacacatggttgggctgcagagcagttgcttaaaacggcagaaatgctgttaggcgagcaggaaaacgtcggctggatcgatttcgttccaggtgaaaatgccgaaacgctgattgaaaagtacaacgctcagttggcaaaactcgacaccactaaaggcgtgctgtttctcgttgatacatggggaggcagcccgttcaatgctgccagccgcattgtcgtcgacaaagagcattatgaagtcattgcaggcgttaacattccaatgctcgtggaaacgttaatggctcgtgatgatgacccaagctttgatgaactggttgcgctggcagtagaaacaggccgtgaaggcgtgaaagcactgaaagccaaaccggttgaaaaagccgcgccagcacccgctgccgcagcacccaaagcggctccaactccggcaaaaccaatggggccaaacgactacatggttattggccttgcgcgtatcgacgaccgtctgattcacggtcaggtcgccacccgctggaccaaagaaaccaatgtctcccgtattattgttgttagtgatgaagtggctgcggatactgttcgtaagacactgctcacccaggttgcacctccgggcgtaacagcacacgtagttgatgttgccaaaatgattcgcgtctacaacaacccgaaatatgctggcgaacgtgtaatgctgttatttaccaacccaacagatgtagagcgtctcgttgaaggcggcgtgaaaatcacctctgttaacgtcggtggtatggcattccgtcagggtaaaacccaagtgaataacgcggtttcggttgatgaaaaagatatcgaggcgttcaaaaaactgaatgcacgcggtattgagctggaagtccgtaaggtttccaccgatccgaaactgaaaatgatggatctgatcagcaaaatcgataagtaa

SEQ ID NO: 68 - DNA, 2049 bp, Escherichia coli
atgaacatgttttttaggcttaccgcgttagctggcctgcttgcaatagcaggccagaccttcgctgtagaagatatcacgcgtgctgatcaaattccggtattaaaggaagagacgcagcatgcgacggtgagtgagcgcgtaacgtcgcgcttcacccgttctcattatcgccagttcgacctcgatcaggcattttcggccaaaatctttgaccgctacctgaatctgctcgattacagccacaacgtgctgctggcaagcgatgttgaacagttcgcgaaaaagaaaaccgagttaggcgatgaactgcgttcaggcaaactcgacgttttctacgatctctacaatctggcgcaaaagcgtcgttttgaacgttaccaatacgctttgtcggtactggaaaagccgatggatttcaccggcaacgacacttataaccttgaccgcagcaaagcgccctggccgaaaaacgaggctgagttgaacgcgctgtgggacagtaaagtcaaattcgacgagttaagcctgaagctggcaggaaaaacggataaagaaattcgtgaaaccctgactcgccgctacaaatttgccattcgtcgtctggcgcaaaccaacagcgaagatgttttctcgctggcaatgacggcgtttgcgcgtgaaatcgacccgcataccaactatctttccccgcgtaataccgaacagttcaacactgaaatgagtttgtcgctggaaggtattggcgcagtgctgcaaatggatgatgactacaccgttatcaattcgatggtggcaggtggtccggcagcgaagagtaaagctatcagcgttggtgacaaaattgtcggtgttggtcaaacaggcaagccgatggttgacgtgattggctggcgtcttgatgatgtggttgccttaattaaagggccgaagggcagtaaagttcgtctggaaattttacctgctggtaaagggaccaagacccgcactgtaacattgacccgtgaacgtattcgtctcgaagaccgcgcggttaaaatgtcggtgaagaccgtcggtaaagagaaagtcggcgtgctggatattcctggcttctatgtgggtttgacagacgatgtcaaagtgcaactgcagaaactggaaaaacagaatgtcagcagtgtgatcatcgatctgcgtagcaatggtggtggggcgctgaccgaagcggtatcgctctcaggtctgtttattcctgcgggtcctattgttcaggtccgtgataacaacggtaaagttcgtgaagacagcgataccgacggacaggttttctataaaggcccgctggtggtactggttgaccgcttcagtgcttcggcttcagaaatctttgccgcggcaatgcaggattacggtcgtgcactggttgtgggtgaaccgacgtttggtaaaggcaccgttcagcaataccgttcattgaaccgtatttacgatcagatgttacgtcctgaatggccagcgctgggttctgtgcagtacacgatccagaaattctatcgcgttaacggcggcagtacgcaacgtaaaggcgtaacgccagacatcatcatgccgacgggtaatgaagaaacggaaacgggtgagaaattcgaagataacgcgctgccgtgggatagcattgatgccgcgacttatgtgaaatcaggcgatttaacggcctttgaaccggagctactgaaggaacataatgcgcgtatcgcgaaagatcctgagttccagaacatcatgaaggatatcgcgcgcttcaacgctatgaaggacaagcgcaatatcgtttctctgaattacgctgtgcgtgagaaagagaataatgaagatgatgcgacgcgtttggcgcgtttgaacgaacgctttaaacgcgaaggtaaaccggagttgaagaaactggatgatctaccgaaagattaccaggagccggatccttatctggatgagacggtgaatatcgcactcgatctggcgaagcttgaaaaagccagacccgcggaacaacccgcacccgtcaagtaa

SEQ ID NO: 69 - DNA, 1758 bp, Escherichia coli
atggcacaagtcattaataccaacagcctctcgctgatcactcaaaataatatcaacaagaaccagtctgcgctgtcgagttctatcgagcgtctgtcttctggcttgcgtattaacagcgcgaaggatgacgccgcaggtcaggcgattgctaaccgttttacttctaacattaaaggcctgactcaggcggcccgtaacgccaacgacggtatttctgttgcgcagaccaccgaaggcgcgctgtccgaaatcaacaacaacttacagcgtattcgtgaactgacggttcaggccactacagggactaactccgattctgacctggactccatccaggacgaaatcaaatctcgtcttgatgaaattgaccgcgtatccggccagacccagttcaacggcgtgaacgtgctggcgaaagacggttcaatgaaaattcaggttggtgcgaatgacggcgaaaccatcacgatcgacctgaaaaaaatcgattctgatactctgggtctgaatggctttaacgtaaatggtaaaggtactattaccaacaaagctgcaacggtaagtgatttaacttctgctggcgcgaagttaaacaccacgacaggtctttatgatctgaaaaccgaaaataccttgttaactaccgatgctgcattcgataaattagggaatggcgataaagtcacagttggcggcgtagattatacttacaacgctaaatctggtgattttactaccactaaatctactgctggtacgggtgtagacgccgcggcgcaggctgctgattcagcttcaaaacgtgatgcgttagctgccacccttcatgctgatgtgggtaaatctgttaatggttcttacaccacaaaagatggtactgtttctttcgaaacggattcagcaggtaatatcaccatcggtggaagccaggcatacgtagacgatgcaggcaacttgacgactaacaacgctggtagcgcagctaaagctgatatgaaagcgctgctcaaagcagcgagcgaaggtagtgacggtgcctctctgacattcaatggcacagaatataccatcgcaaaagcaactcctgcgacaaccactccagtagctccgttaatccctggtgggattacttatcaggctacagtgagtaaagatgtagtattgagcgaaaccaaagcggctgccgcgacatcttcaattacctttaattccggtgtactgagcaaaactattgggtttaccgcgggtgaatccagtgatgctgcgaagtcttatgtggatgataaaggtggtatcactaacgttgccgactatacagtctcttacagcgttaacaaggataacggctctgtgactgttgccgggtatgcttcagcgactgataccaataaagattatgctccagcaattggtactgctgtaaatgtgaactccgcgggtaaaatcactactgagactaccagtgctggttctgcaacgaccaacccgcttgctgccctggacgacgcaatcagctccatcgacaaattccgttcttccctgggtgctatccagaaccgtctggattccgcagtcaccaacctgaacaacaccactaccaacctgtccgaagcgcagtcccgtattcaggacgccgactatgcgaccgaagtgtccaacatgtcgaaagcgcagatcattcagcaggccggtaactccgtgctggcaaaagctaaccaggtaccgcagcaggttctgtctctgctgcagggttaa

SEQ ID NO: 70 - DNA, 669 bp, Escherichia coli
atgtgtggacgctttgcccaatcccaaacgcgtgaagattaccttgcgcttctcgcggaagatattgaacgcgatattccctatgatcccgaacccattggcagatacaacgtcgcgccgggaaccaaagtcctactgctcagtgaacgtgatgaacaccttcatctggatccggttttctggggatatgctcccggatggtgggataaaccgccgctgattaacgcccgcgtagaaactgcggcaaccagtcgtatgtttaaaccgctctggcaacatggtcgggcaatctgttttgccgatggctggtttgagtggaaaaaagaaggcgacaaaaagcagccttattttatctatcgtgctgatggacaacctgtttttatggcagcgataggcagcacaccgttcgagcgcggtgacgaagccgaaggatttttgattgtcactgcagcagcagaccagggtctggtagatattcatgaccgccgcccgctggttctgtcgccagaagctgcgcggaaatggatgcggcaagagattagcggtaaagaagcctcagaaatcgcggccagtggctgtgttccagcaaaccagttctcctggcacccggtatcgcgcgcggtgggtaatgttaaaaaccagggtgcggagttaattcaacctgtttga

SEQ ID NO: 71 - DNA, 315 bp, Escherichia coli
atgtcagcgatacaggggattgaaggggttatcagccagttacaggctacggcgatgagtgcgcgtgcgcaggaatcactgccgcaaccgaccattagttttgccgggcagctgcacgccgcgctcgatcgcataagcgatacacaaacagccgcccgcacgcaggcagaaaaattcactctcggtgaacccggcgtggcgttaaacgatgtgatgaccgatatgcaaaaagcctcagtttctatgcaaatggggattcaggtgcgtaataagctggtggcggcatatcaggaagtaatgagcatgcaggtatag

SEQ ID NO: 72 - DNA, 1419 bp, Escherichia coli
atgcaggaaaatatatcagtaaccgattcatacagcaccgggaatgccgcacaggcaatgctggagaaactgctgcaaatttatgatgttaaaacgctggtggctcagcttaatggtgtgggtgagaatcactggagcgcggcaattttaaaacgtgcgctggcgaatgactcggcatggcaccgtttaagtgagaaagagttcgcccatctgcaaacgttgttacccaaaccaccggcacatcatccgcattatgcgtttcgctttatcgatctatttgccggaattggcggcatccgtcgcggttttgaatcgattggcggacagtgcgtgtttaccagcgaatggaacaaacatgcggtacgcacttataaagccaatcattattgcgacccggcgacgcatcattttaatgaagatatccgcgacatcaccctcagccataaagaaggcgtgagtgatgaggctgcggcggaacatattcgtcaacacattcctgaacacgatgttttactggccggtttcccttgtcagccattttcgctggctggcgtatcgaaaaagaactcgctcgggcgggcgcacggttttgcctgcgatactcagggcacgctgttctttgatgtggtgcgcattatcgacgcgcgtcgtccggcgatgtttgtgctcgaaaacgtcaaaaacctgaaaagccacgaccagggtaaaacgttccgcatcatcatgcagacgctggacgaactgggctatgacgtggctgatgcagaagataacgggccggacgatccgaaaatcatcgatggcaaacattttctgccgcagcaccgtgaacgcatcgtgctggtgggttttcgtcgcgatcttaatctgaaagccgattttactctgcgtgatatcagcgaatgtttccctgcacagcgagtgacgctggcgcagctgttggacccgatggtcgaggcgaaatatatcctgacgccggtgctgtggaagtacctctatcgatatgcgaaaaaacatcaggcgcgcggaaacggcttcggttatggaatggtttatccgaacaatccgcaaagcgtcacccgtacgctgtctgcgcgttattacaaagatggcgcggaaattttaatcgatcgcggctgggatatggccacgggtgagaaagactttgacgatccgctgaatcagcaacatcgtccacgtcggttaacgcctcgggaatgcgcgcgcttaatgggttttgaagcgccgggagaagcgaaattccgcattccggtttcggacactcaggcctatcgccagttcggtaactcggtggtcgtgccggtctttgccgcggtggcaaaactgcttgagccaaaaatcaaacaggcggtggcgttgcgtcagcaagaggcacaacatggccgacgttcacgataa

SEQ ID NO: 73 - DNA, 4038 bp, Escherichia coli
ttgggtgttcatacagccgaagccacactgcctaacggcaacaacgatacgaagatagtcaatattgcgcccgatgccagcaacgcgcaggttacgctgaacatccctgctcaacaggtggtgacgaataacagcgacagcgtgcagctgacggcgacggtgaaagatccgtcgaatcatccggtggcgggaataacggtgaacttcaccatgccacaggacgtggcggcaaactttaccctcgaaaataacggtattgccatcacccaggccaatggggaagcgcatgtcacgctcaaaggtaaaaaagcgggtacgcatacggttaccgcaacgctgagtaataacaataccagtgattcacagccggtaacgtttgtggcggacaaaacctcggctctggttgttcttcagatatcaaaaaatgagatcacaggtaatggcgtcgatagcgcaacgctaactgcaacggtcaaagatcagttcgacaatgaggtgaacaatcttccggtaacattcagcacagcttcttcaggcctcaccctgaccccaggggaaagtaataccaatgagtctggcatcgcgcaggccactctcgcaggcgttgcctttggtgagcagacggtcactgcatcactggctaataatggtgccagcgacaacaaaactgtgcattttattggcgacacagcggcggcaaaaattatcgagttgacgcctgtcccagacagcataatcgcaggtaccccgcagaacagctccggcagcgtcatcaccgccacagtcgttgataataatggctttccggtgaaaggtgtgactgtgaacttcaccagcaacgcagcgacagccgaaatgacgaatggcggtcaagccgtgacgaacgaacagggtaaggctaccgtcacttataccaatacccgctcctcgatagaatcaggagcgagaccggataccgttgaggccagtctggaaaatggtagctccacgcttagcacatcaattaatgtcaacgctgatgcgtctacggcacatctcaccttgctacaggcactttttgatacagtctccgcaggcgacactaccaatctgtatattgaggtgaaggataattacggcaacggagtaccccagcaggaggtaaccctcagcgtttcaccaagtgaaggtgtgacccccagtaataacgctatatatacgaccaatcacgacggcaatttttacgcaagctttaccgctacaaaagccggggtataccaagtgacggcaaccctcgaaaatggcgattcgatgcaacaaacagtgacctatgtgccgaacgtagcgaatgctgaaatctcgctggcagcctcgaaggatccggtaattgccaacaataacgatctcacgacactaacagcaacagtcgctgatacagagggcaatgcgatagccaacagtgaggtaacatttactctgccggaagatgtgagggcgaacttcacgctgggcgatggcggtaaagtggttactgatactgaaggcaaagcgaaagtcacgctgaaaggtacaaaagcaggcgctcatactgttacagcatcgatggctggcggtaagagtgagcagttggtggtgaactttattgcggatacactcactgcgcaggttaatcttaacgttaccgaggacaattttatcgctaataacgtcgggatgaccaggctgcaggcaacagtgactgatggaaacggcaacccgttagccaatgaggcggtgacattcacgctaccggcagatgtgagcgcaagctttactctcggacaaggcggttccgccattactgacatcaacggcaaggctgaagttacactgagcggtacaaaatccggcacctaccccgtgacagttagcgtgaacaattatggtgtcagtgatacgaaacaggtgactttgattgccgatgctggtaccgcaaaactagcctccttaacctctgtatactcattcgtcgtcagcacgaccgagggcgcgaccatgactgcaagcgtcactgacgctaacggcaacccggtagaaggtataaaagttaatttccgcggaacttccgtcacgctaagcagcaccagcgttgaaacggatgatcggggtttcgctgaaattcttgtgacaagcaccgaggtcggactgaaaacagtttcagcctctctggcagataaacctactgaagtcatctcgcgattactgaatgcaaaagcagatattaattctgcaacgattaccagtctggagatacctgaaggtcaggtcatggtcgcacaagacgtagcagttaaagctcacgtcaacgaccagtttggcaatccgattcttaatgaatctgtaacattcagtgcagaaccaccagagcacatgaccatcagccaaaatattgtctctactgatacgcatggtatagccgaggtcactatgacgcccgaaagaaacggttcgtatatggtgaaagcatccctggcgaatggatcctcttatgagaaggatctggtggtaatcgatcaaaaactgacactctcggcgtccagcccgcttatcggtgtcaattccccaacaggtgcaactctgacggcaacgctaacttctgcaaatggcactccagtggagggtcaggtcatcaactttagcgtaacgccagaaggtgcgacgttaagtggcggaaaagtgagaaccaactcttcaggtcaggctccagtcgttctgaccagcaataaagtcggtacatatacggtgactgcatcgttccataacggcgtaacaatacagacacagacaatcgtgaaagtcactggcaactcaagcaccgcccatgttgctagctttatcgctgatccatcgactatagccgccaccaacagtgatttaagtaccttaaaggcaacggttgaggatggcagtggtaacctgatcgaaggtctcactgtgtacttcgccttaaaaagcggctctgccacattaacgtcattaacagcggtgacagatcaaaacggaatcgcgacaacaagcgtgagaggagcgataacggggagcgtcacggtaagcgcagtcacgaccgctggtggaatgcaaacagtagatataacgctggtggcaggcccggcagacgcctcgcagtccgtccttaagaacaatcggtcatcattgaaaggagactttaccgatagtgctgagctacatcttgttctgcacgatatatcaggcaatccgatcaaagtttctgaagggctggaatttgtgcagtcaggtaccaacgcgccctatgtgcaagttagtgcaattgactacagtaaaaatttctcaggcgagtacaaagccactgttacaggcggcggagagggtatcgcaacgctgatccctgtattgaatggtgttcatcaagcgggtctgagtaccacaatacaattcactcgcgcagaagacaaaataatgagcggtacagtgttagtcaatggtgctaacctaccgacaactacattcccttcgcaggggttcactggggcgtattatcagttgaataatgacaactttgccccaggaaaaacggcggctgattatgagttttcaagctctgcctcctgggttgatgttgatgctaccggtaaagtgacatttaaaaatgtcggcagcaaatgggagaggattacggcgacgccaaaaacaggcggccctagctatatatacgaaatccgagtgaagagttggtgggtgaacgccggcgatgctttcatgatatacagccttgctgaaaatttttgcagtagcaatggctacacacttccccttggagaccatttaaaccatagtcgttcccgaggcatcgggtcactgtacagtgaatggggagatatggggcattacacgactgaagctggttttcattcaaatatgtattggtcatcgagtcccgcaaactcaaacgaacaatacgtagtttccctggcaacaggtgatcaaagcgtatttgaaaagcttgggtttgcttatgcgacatgttataaaaacctctga

SEQ ID NO: 74 - DNA, 2199 bp, Escherichia coli
gtgggcgcaggcattgaacgcagagcaggtataagaatgacagaaaaagtaaaacaacatgccgctccggtaacgggcagtgatgaaatcgatattggtcgcctggtcggcaccgtcattgaagcgcgctggtgggtgattggcatcaccgctgtattcgccctttgtgccgtggtttacaccttcttcgccacgccgatttatagtgccgacgcactggtacaaatcgagcaaagcagcggcaattcgttagtgcaggatatcggatcggcgttagccaacaaaccgcctgcatcggacgccgagatccagttgattcgttcgcgcctggtgcttggtaaaacggtggatgatctcgacctcgatattgcggtgagcaaaaacacgttcccgattttcggtgcgggctgggatcgcctgatgggacgccagaacgagacggtgaaagtgactacctttaaccgtccgaaagagatggaggatcaggtgtttacgcttaatgtgctggacaacaaaaactacaccctgagcagcgatggcggctttagcgcccgtgggcaagcgggccagatactgaaaaaagaaggcgtcacgctgatggttgaagccattcacgcccgcccgggcagtgagtttaccgtcaccaaatactccacgctggggatgatcaatcaactgcaaaacagcctgacggtaacggagaacggcaaagacgcaggcgtactgagcctgacttataccggtgaagatcgcgaacagatccgcgacattcttaacagcatcgcccgtaactatcaggaacaaaatattgagcgcaaatcggcggaagcgtcgaaaagcctcgctttcctcgcgcaacagttaccggaagtacgtagccgccttgatgttgccgaaaacaaactgaatgccttccgtcaggataaagattctgttgatctgccgctggaagcgaaagcggtgctcgattcgatggtgaacatcgacgcccagttgaacgaactgacctttaaagaggcggaaatctccaagctgtacaccaaagttcaccccgcgtaccgcacgctgctggagaaacgtcaggcgctggaagacgaaaaagccaaacttaatggtcgcgtaacggcgatgccgaaaacccagcaggaaattgtccgtctgacccgcgatgtcgagtctggtcagcaggtctatatgcaactgctgaataaagagcaggagctgaaaatcaccgaggccagcaccgtcggcgatgtgcgcattgttgacccggcaatcactcagcctggtgtgctaaaaccgaagaaagggctgattatccttggggcgattatccttggcctgatgctctctatcgtgggggtgctgctgcgctcgttgtttaatcgcggcatcgaaagcccgcaggtgctggaagaacacggtatcagcgtctatgccagcatcccgctgtcggagtggcagaaagcgcgcgatagcgtcaaaaccatcaaagggattaaacgctataaacagagccagctactggcggtggggaatccaaccgatctggcgattgaagccatccgcagccttcgtaccagtttgcacttcgcgatgatgcaggcgcagaacaatgtgttgatgatgaccggggttagcccgtcaatcggtaaaacctttgtctgcgccaacctggcggcggtgatcagccagaccaataaacgcgtgttgttgatcgactgcgatatgcgcaaaggctacacccatgagctgttgggcactaataacgttaatggcctgtcggaaattctgattggtcagggcgatattactacagctgctaaaccgacctctattgccaaatttgacctgatcccgcgcggtcaggtaccgccaaatccttctgaactgttgatgagcgaacgctttgccgaactggtgaactgggcgagtaaaaactacgacctggtgttgattgatacgccgccgattctggcagtgaccgatgcggcaattgttggtcgtcatgtcggaaccacgttaatggtggcgcgttatgcggtcaacacattgaaagaagtggaaaccagtctgagccgctttgagcaaaacggtattccggtgaaaggggtgattctgaactccatcttccgccgcgccagcgcgtatcaggattatggctattacgaatacgaatataagtcggatgcgaaataa

SEQ ID NO: 75 - DNA, 1395 bp, Escherichia coli
gtgttattactggatgcgtgctcgcaaatgtgcccgccattcagacgattcccgatagtgtttcataattcctccatttttctcccttattggctggctacactagtatcattccgcgaaacgtttcaggaagagaaactcttaacgatgaaaggcagttataaatcccgttgggtaatcgtaatcgtggtagttatcgccgccatcgccgcattctggttctggcaaggccgcaatgactcccagagtgcagccccaggggcgacgaaacaagcgcagcaatcgccagcgggtggtcgccgtggtatgcgttccggcccattagccccggttcaggcggcgaccgccgtagaacaggcagttccgcgttacctcaccgggcttggcaccattaccgctgctaatactgttacggtgcgtagccgcgtggacggtcaactgatggcgttacatttccaggaaggccagcaggtcaaagctggcgatttactggcagaaattgaccccagccagttcaaagttgcattagcacaagcccagggccaactggcaaaagataaagccacgcttaccaacgcccgccgtgatctggcgcgttatcagcaactggcaaaaaccaatctcgtctcccgccaggagctggatgcccaacaggcgctggtcagtgaaaccgaaggcaccattaaggctgatgaagcaagcgtcgccagcgcgcagctgcaactcgactggagccgtattaccgcaccagtcgatggtcgcgttggtctcaagcaggttgatgttggtaaccaaatctccagtggtgataccaccgggatcgtggtgatcacccagacgcatcctatcgatttgctctttaccctgccggaaagcgatatcgctaccgtcgtgcaggcgcaaaaagccggaaaaccgctggtggtagaagcctgggatcgcaccaactcgaagaaattaagtgaaggcacgctgttaagtctcgataaccaaatcgatgccactaccggtacgattaaagtgaaagcacgctttaataatcaggatgatgcgctgtttcccaatcagtttgttaacgcgcgcatgttagtcgacaccgaacaaaacgccgtagtgatcccaacagccgccctgcaaatgggcaatgaaggccattttgtctgggtgctgaatagcgaaaacaaggtcagcaaacatctggtgacgccgggcattcaggacagtcagaaagtggtgatccgcgcaggtatttctgcgggcgatcgcgtggtgacagacggcattgatcgcctgaccgaaggggcgaaagtggaagtggtggaagcccagagcgccaccactccggaagagaaagccaccagccgcgaatacgcgaaaaaaggagctcgctcctga

SEQ ID NO: 76 - DNA, 2298 bp, Escherichia coli
atgaaatggctatgttcagtaggaatcgcggtgagtctggccctgcagccagcactggcggatgatttattcggtaaccatccattaacgcctgaagcgcgggatgcgttcgtcaccgaactgcttaagaaaatgacagttgatgagaaaattggtcagctgcgcttaatcagcgtcggcccggataacccgaaagaggcgatccgcgagatgatcaaagacggtcaggttggggctattttcaacaccgtaacccgtcaggatatccgcgccatgcaggatcaggtgatggaattaagccgcctgaaaattcctcttttctttgcttacgacgtgctgcacggtcagcgcacggtgttcccgattagcctcggtctggcctcgtcttttaacctcgatgcagtaaaaacggtcggacgtgtctctgcttatgaagcggcagatgatggcctgaatatgacctgggcaccgatggtcgatgtctcgcgcgatccgcgctggggacgtgcttccgaaggttttggcgaagatacgtatctcacctcaataatgggtaaaaccatggtggaagcgatgcagggtaaaagcccggcagatcgttactcggtgatgaccagcgtcaaacactttgccgcatacggcgcggtagaaggcggtaaagagtacaacaccgtcgatatgagtccgcagcgcctgtttaatgattatatgccgccgtacaaagcggggctggacgcaggcagcggcgcggtgatggtggcgctgaactcgctgaacggcacgccagccacctccgactcctggctgctgaaagatgttctgcgcgaccagtggggctttaaaggcatcaccgtttccgatcacggtgcaatcaaagagctgattaaacatggcacggcggcagatccggaagatgcagtgcgcgtggcgctgaaatccggaatcaacatgagcatgagcgacgagtactactcgaagtatctgcctgggttgatcaaatccggtaaagtgacgatggcagagctggacgatgctgcccgccatgtactgaacgttaaatatgatatggggttgtttaacgacccatacagccatctcggtccgaaagagtctgacccggtggataccaatgccgaaagccgcctgcaccgcaaagaagcgcgtgaagtggcgcgtgaaagcctggtgttgctgaaaaaccgtctcgaaacgttaccgctgaaaaaatcagccaccattgcggtggttgggccactggcggacagtaaacgtgacgtgatgggcagctggtcggcggcaggtgttgccgatcaatccgtgaccgtgctgaccgggattaaaaatgccgtcggtgaaaacggtaaagtgctgtatgccaaaggggcgaacgttaccagtgacaaaggcattatcgatttcctgaatcagtatgaagaagcggtcaaagtcgatccgcgttcgccgcaagagatgattgatgaagcggtgcagacggcgaaacaatctgatgtggtggtggctgtagtcggtgaagcacaggggatggcgcacgaggcctccagccgtaccgatattactattctgcaaagccagcgtgatttgattgccgccctgaaagccaccggcaaaccgctggtgctggtgctgatgaacgggcgtccgctggcgctggtgaaagaagatcagcaggctgatgcgattctggaaacctggtttgccgggactgaaggcggtaatgcaattgccgatgtgttgtttggcgattacaacccgtccggtaagctgccgatgtccttcccgcgttctgtcgggcagatcccggtgtactacagccatctgaacaccggtcgtccgtataatgccgacaagccgaacaaatacacttcgcgttattttgatgaagctaacggggcgctttatccgttcggctatggtctgagctataccactttcaccgtctctgatgtgaaactttctgcgccgaccatgaagcgtgacggcaaagtgacggccagcgtgcaggtgacgaacaccggtaaacgcgaaggggccacggtagtgcagatgtacttgcaggatgtgacggcttccatgagccgtccagtgaagcagctgaaaggctttgagaaaatcaccctgaagccgggcgaaacccagaccgtcagcttcccgattgatatcgaggcgctgaagttctggaatcaacagatgaaatatgacgccgagcctggcaagttcaatgtctttatcggcactgattccgcacgcgttaagaaaggcgagtttgagttgctgtaa

SEQ ID NO: 77 - DNA, 2511 bp, Escherichia coli
ttggcatcaacagttgagtatggtgagacagttgatggtgttgtcctggaaaaagatatccagctggtttatgggaccgccaataatacgaaaatcaatcctggcggagaacagcatattaaagaatttggtataagtagtaatactgaaattaacggcgggtatcagtacattgaaatgaatggcaccgcagaatactcagtattaaatgatggttatcaaattgttcaaatgggtggcgcggcaaaccagactacgctcaataatggtgtgctacaggtttatggcgcagcgaatgatcccacgattaaaggcgggcgcttaatcgttgaaaaagatgggattaccgtccttgccgctatcgaaaagggaggattactggaggttaaagaggggggattagcgattgcggtagatcagaaagcaggcggtgctattaaagcaagcacgcgggtcatggaggtattcggaacaaaccgtctcggtcagttcgaaatcaagaatggtattgctaacaatatgctgttggaaaacggcggaagtttgcgagttgaagaaaatgacttcgcttataatactactgtagatagtggcggcttactggaggttatggatggcgggactgcaactggcgttgataaaaaagcaggcggaaaattaattgtctcaacgaatgcgctggaagtgagtggtacaaacagtaaaggccaatttagtataaaagatggtgtgtcaaaaaattatgaactggatgatggttccgggcttattgttatggaggacacgcaggccattgacactatcctcgatgagcatgccactatgcaatcgctgggaaaggatactggtacgagagtgcaggcaaatgcggtatatgatctcggtcgatcagatcagaatggaagtataacgtattcctctaaagccatctctgaaaatatggttatcaacaatggccgcgctaacgtctgggctggcacaatggttaacgtgtcagtcagaggaaatgatggcattcttgaggttatgaagccgcaaataaattatgcacccgcaatgttggtgggtaaggtagtggtttctgagggcgcttctttaagaacgcatggtgccgtggataccagcaaagcggatgtttcgctcgaaaatagcgcatggaccatcattgccgatatcactacgacgaaccaaaacacccgccttaacttagccaaccttgcgatgtctggcgcaaatgtgattatgatggatgagtcagtgactcgttcatctgtgacggcaagtgcggaaaatttcactacgttgaccaccaataccctgtcgggaaacggcaatttttatatgcgtaccgatatggcgaatcatcagagcgatcagctcaacgtcaccggtcaggcaacaggtgatttcaaaatattcgtgacggacaccggtgccagcccggcagcaggagatagccttacactggtaacaacgggcggcggtgatgctgcatttacgttgggcaatgccggaggcgttgttgatatcggtacgtatgaatataccttgctggataatggtaaccatagctggagtctggcagagaatcgcgcgcaaattaccccttcaaccactgatgtgctgaatatggcggccgcacaaccgctggtatttgatgcagaactggacaccgtgcgtgagcgtcttggtagcgtaaaaggcgttagttacgatacggcgatgtggagttcggcaattaacacccgcaacaacgtgaccactgatgcgggagctggttttgagcaaacattgacgggcctgacgctcggtatcgatagccgtttctcccgtgaagaaagcagcacaattcgcggcttgttctttggttactctcattctgatattggttttgatcgcggcggcaaaggcaatgtcgatagctataccctgggggcttatgccggttgggagcatcagaacggtgcctatgttgatggagtggtgaaagttgaccgttttgccaacaccatccatggcaagatgagtaatggggcaacagcgtttggcgattacaatagtaacggcgcgggtgctcatgtcgagagcgggttccgttgggttgacggattgtggagtgttagaccctatctggcctttaccggctttaccacagatggtcaggactacacgttatcaaacggcatgcgcgcggatgtgggaaatacccggatattacgcgctgaagcgggaacggcggtaagctatcacatggacctgcaaaacggtacgacgctggaaccctggctgaaagccgccgtgcgtcaggaatacgccgattctaaccaggtgaaagttaatgacgatggcaaatttaataatgatgtggctggaacccgtggcgtttatcaggctgggataaggtcatcgtttaccccgacgttaagcggtcatttgtcagtcagctatggcaatggcgcaggggtagaatcgccgtggaatacccaggcgggtgtggtctggacgttctga

SEQ ID NO: 78 - DNA, 1056 bp, Escherichia coli
atggaaataagctttacccgcgtggcactgctggctgccgcgctcttctttgttggttgcgatcaaaaaccacaacccgccaaaacccacgctactgaagttaccgttcttgaaggcaaaactatgggtaccttctggcgtgccagcatcccgggcattgacgccaaacgcagcgccgaacttaaagaaaagattcagacccagctggacgccgacgatcagctgctttcgacctataaaaaagattccgcgctgatgcgctttaacgactcgcaaagtttatcgccgtggccggtaagtgaagcgatggccgatatcgtcaccacctcgctacgcattggcgcgaagaccgatggcgcgatggatataaccgtcgggccgctggtgaatctgtggggtttcggtccggaacaacagccggttcaaattccgagccaggaacagatcgacgcgatgaaagccaaaactggtttacagcaccttacggtcattaatcagtcgcatcagcaatatctgcaaaaagacctgccggatttatatgtcgatctctccaccgtcggcgaaggttatgcggcggatcacctggcacgcttgatggagcaggaagggatttcccgctatctggtgtcggtgggcggcgcgctgaacagccgtggtatgaacggtgaaggcctgccgtggcgggtagcgattcaaaaaccaaccgataaagaaaacgcggttcaggccgtggtggatatcaacggtcatgggattagcacctctggcagctaccgtaactattacgaactggacggcaaacgtctttcccatgttatcgatccgcaaaccgggcgtcccatcgaacacaatctggtatccgtgacggtgattgcaccgacggcgctggaagccgacgcctgggatacaggtttgatggtactcgggccggagaaagccaaagaagttgttcgccgggaagggctggcggtttatatgatcaccaaagaaggcgatagctttaaaacctggatgtcaccacagtttaaaagcttccttgtcagcgaaaaaaattaa

SEQ ID NO: 79 - DNA, 4605 bp, Escherichia coli
atggatacccaacgattccaatcccaatttcattggcatttatcgtttaaattttctggcgcgatagcagcgtgcttgtccctgtctcttgtgggaacagggcttgctaatgctgatgattcgcttccttccagtaactatgcgccgcccgccgggggaacattctttttgcttgctgacagcagttttagcagcagtgaagagtcgaaagtgcgactggaagcgccggggcgtgattatcggcgctatcagatggaagagtacggcggcgtggacgttcgcctgtatcgtattcctgacccgatggcatttttgcgccagcagaaaaacctgcatcgcattgtggtgcaaccgcaatatctgggcgacgggctgaacaatacgctgacctggctgtgggataactggtacggcaaatctcgccgcgtgatgcagcgtactttctcttctcagtcacggcagaatgtgactcaggcattacccgaattacagctcggcaatgccattattaaaccttcccgttatgtacagaacaaccagttttccccgctgaaaaaatatcccctggtggaacagttccgttatccactatggcaggctaaaccggtcgagccgcagcaaggggtaaaactggaaggcgcatccagcaatttcatctcgccgcagccgggtaacatttatattcctctcggccaacaagagccgggactgtacctcgtcgaggcgatggttggtgggtatcgggcgacgacggtggtgtttgtttccgataccgtggcgcttagcaaagtgtcaggcaaagagcttctggtgtggaccgcgggtaaaaaacagggtgaagcgaagcccggctcagagatcttgtggactgacggtcttggcgtgatgacccgcggtgtgaccgatgacagcggtaccttgcagttacaacatatatcgccagaacgttcatacattctgggtaaggatgctgaaggcggcgtttttgtctccgagaacttcttctacgaaagcgaaatctacaacacccgcttgtatatttttaccgatcgcccgctatatcgcgcaggcgatcgtgtcgatgttaaagtgatgggccgcgagttccacgatccgttgcattcatcccccatcgtcagcgccccggcgaagctttcggtgctggacgctaacggcagtctgttgcaaaccgtcgatgtcacgctggatgcgcgcaatggcgggcagggaagtttccgcctgccagaaaatgccgttgccggaggttatgagttacgtcttgcttaccgcaatcaggtctatagcagcagttttcgcgtggcaaactacatcaagccacatttcgagattggtttagctctcgacaaaaaagagttcaaaactggcgaagcggtcagcggcaaactgcaacttctctacccggatggcgagccggtaaaaaatgcccgcgtgcagttaagtttgcgcgctcagcaattatcaatggtcggtaacgatttgcgttatgccggacgtttccccgtgtcgctggaaggcagcgaaacggtgtccgacgccagcggtcatgtggcgttaaatctccccgccgccgataaaccgagccgctatttgttaaccgtctccgccagtgacggcgcggcgtatcgcgtcaccaccaccaaagagatcctcattgaacgcggcctggcgcattactctttaagtaccgccgcacaatacagtaatagcggcgagtcggttgtgttccgttatgccgcgctggaatcttcaaaacaggttcctgttacgtatgaatggttgcgtctcgaagaccgcacgagccatagcggagatctaccgtcaggcggcaaatcctttaccgtcaatttcgataaacctggcaactacaatctgacgttacgcgataaagacggcttaattctcgccgggttaagccatgccgtcagcggtaagggcagtatgtcgcatactggtacggtagatatcgtggcagataaaacgctgtaccagcctggcgaaaccgcgaagatgctgattaccttcccggagccaattgatgaagcattattgacgctggaacgcgatcgcgttgaacagcagtcgctgctatcgcatccggcaaactggctgacgttacaacgtttaaacgatactcaatatgaagcccgtgttccagtgagcaattcctttgcgcctaacatcactttttcggtgctgtatacccgtaacggtcagtacagttttcagaacgccgggatcaaagttgccgttccccagctggatatccgggtgaaaacggacaaaacccattaccagcctggtgaactggtcaatgtcgaattaacctcgtcgctgaaaggtaaacctgtttctgcgcagctaacggtaggcgtggtcgatgaaatgatctacgcgctgcaaccagaaatcgcgccgaatatcggcaaatttttctatccgctggggcgtaacaatgtgcgtaccagctccagtctgtcgtttatcagctacgaccaggcactctccagcgagccggttgcgcctggcgcaactaaccgcagcgagcggcgagtaaaaatgcttgaacgtccacggcgtgaagaggtggataccgcggcatggatgccgtcactcacaaccgataaacaaggcaaagcgtatttcacgttcctgatgcctgattcgttaacccgctggcgtatcaccgcgcgtgggatgaacggcgacgggctggtcgggcaggggcgtgcttatctgcgttcggaaaaaaatctctacatgaagtggagtatgccaacggtgtatcgcgtgggcgacaaaccgtcggcaggactgtttatcttcagtcagcaggataacgaaccggtggcgctggtgactaaatttgcaggcgctgagatgcgccagacgctgacgctgcacaaaggggcgaattatatttcgctggcgcagaacattcagcaatctggcttgttaagcgcagaactgcaacaaaatgggcaagtgcaggacagcattagcacaaaactgtcttttgtggataacagctggcccgttgaacagcagaaaaatgtcatgctcggcggtggcgataacgcgctgatgttgcccgagcaggcgagcaatatccggctacaaagtagtgaaacgccgcaggagattttccgcaacaatcttgatgcgttagtcgatgaaccgtgggggggggtgatcaacaccggtagccgtctgatcccgctcagtctcgcctggcgttcgcttgccgatcatcaaagtgccgccgctaacgacattcgtcagatgattcaggataaccgtctgcggctgatgcaactggcggggcccggagcgcgctttacctggtggggtgaagatggcaatggtgacgccttccttacggcatgggcatggtacgccgactggcaggccagccaggcgctcggcgtaacgcaacaaccggaatactggcagcatatgctcgacagttatgccgagcaggcagataacatgccgttattgcatcgggcgctggtgctggcgtgggcacaggagatgaatctgccgtgcaaaacgttgttgaaagggttggatgaagctatcgcccggcgcggaactaaaactgaagatttctctgaggaagacacccgcgatatcaatgacagcctgatcctcgatacaccggaatctccactggcagatgcggtggcaaacgtcttaaccatgacgttgctgaaaaaagcgcagttgaagtccacggtgatgccacaggttcagcaatatgcgtgggataaagcggtaaacagcaatcagccgctggcacacacggttgtgctgctcaatagcgggggcgacgctacccaggcggctgctattttaagtggtttgaccgctgagcaatctactattgagcgcgcgctggccatgaactggctggcgaaatatatggcgacaatgccttcggttgtgttgcctgcgcctgcgggcgcatgggccaaacataagttaactggagggggcgaatactggcgttgggttggtcagggcgtgccggacattctctcttttggtgacgaattatcgccgcaaaatgtgcaggtccgctggcgtgaagcggcaaaaacggctcaacaaagtaacattccggtgaccgttgaacgccaattgtatcggcttatccctggtgaagaagagatgagctttactctgcaaccggtgaccagcaatgagattgacagcgatgcgctgtatctcgatgaaattacgcttaccagcgagcaggatgcagttctgcgctatggtcaggtggaagtaccgctcccgccgggagccgacgttgagcgcacaacatggggcatttcagtcaataaacccaacgctggaaaacagcaggggcaattgctggaaaaagcgcgaaatgaaatgggcgaactggcctatatggtgccggtgaaagaactgacgggaacggtcactttccgccatttgctgcgcttctcgcaaaaagggcaattcgttctgcctcctgctcgttatgtgcgttcctatgcacctgcacagcaaagtgttgcggcagggagcgaatggaccgggatgcaggtgaaataa

SEQ ID NO: 80 - DNA, 2628 bp, Escherichia coli
atgagcgaccttgcgagagaaattacaccggtcaacattgaggaagagctgaagagctcctatctggattatgcgatgtcggtcattgttggccgtgcgctgccagatgtccgagatggcctgaagccggtacaccgtcgcgtactttacgccatgaacgtactaggcaatgactggaacaaagcctataaaaaatctgcccgtgtcgttggtgacgtaatcggtaaataccatccccatggtgactcggcagtttatgacacgatcgtccgtatggcgcagccattctcgctgcgttacatgctggtagacggtcagggtaacttcggttccatcgacggcgactctgcggcggcaatgcgttatacggaaatccgtctggcgaaaattgcccatgaactgatggccgatctcgaaaaagagacggtcgatttcgttgataactatgacggcacggaaaaaattcccgacgtcatgccaaccaaaattcctaacctgctggtgaacggttcttccggtatcgccgtaggtatggcaaccaacatcccgccgcacaacctgacggaagtcatcaacggttgtctggcgtatatcgatgatgaagacatcagcattgaagggctgatggaacacatcccggggccggacttcccgacggcggcaatcattaacggtcgtcgcggtattgaagaagcttaccgtaccggtcgcggcaaggtatatatccgcgcccgtgctgaagtggaagttgacgccaaaaccggacgtgaaaccattatcgtccacgaaatcccgtatcaggtaaacaaagcgcgcctgatcgagaagattgcggaactggtaaaagaaaaacgcgtggaaggcatcagcgcgctgcgtgacgagtctgacaaagacggtatgcgcatcgtgattgaagtgaaacgcgatgcggtcggtgaagttgtgctcaacaacctctactcccagacccagttgcaggtttctttcggtatcaacatggtggcattgcaccatggtcagccaaagatcatgaacctgaaagacatcatcgcggcgtttgttcgtcaccgccgtgaagtggtgacccgtcgtactattttcgaactgcgtaaagctcgcgatcgtgctcatatccttgaagcattagccgtggcgctggcgaacatcgacccgatcatcgaactgatccgtcatgcgccgacgcctgcagaagcgaaaactgcgctggtggctaatccgtggcagctgggcaacgttgccgcgatgctcgaacgtgctggcgacgatgctgcgcgtccggaatggctggagccagagttcggcgtgcgtgatggtctgtactacctgaccgaacagcaagctcaggcaattctggatctgcgtttgcagaaactgaccggccttgagcacgaaaaactgctcgacgaatacaaagagctgctggatcagatcgcggaactgctgcgtattcttggtagcgccgatcgtctgatggaagtgatccgtgaagagctggagctggttcgtgaacagttcggtgacaaacgtcgtactgaaatcaccgccaacagcgcagacatcaacctggaagatctgatcacccaggaagatgtggtcgtgacgctctctcaccagggctacgttaaatatcagccgctttctgaatacgaagcgcagcgtcgtggcgggaaaggtaaatctgccgcacgtattaaagaagaagactttatcgaccgactgctggtggcgaacacgcacgaccatattctgtgcttctccagccgtggtcgcgtctattcgatgaaagtttaccagttgccggaggccactcgtggcgcgcgcggtcgtccgatcgtcaacctgctgccgctggagcaggacgaacgtatcaccgcgatcctgccggtgaccgagtttgaagaaggcgtgaaagtcttcatggcgaccgctaacggtactgtgaagaaaaccgtcctcaccgagttcaaccgtctgcgtaccgccggtaaagtggcgatcaaactggttgaaggcgatgagctgatcggcgttgacctgaccagcggcgaagacgaagtaatgctgttctccgccgaaggtaaagtggtgcgctttaaagagtcttctgtccgtgcgatgggctgcaacaccaccggtgttcgcggtattcgtttaggcgaaggtgataaagtcgtctctctgatcgtgcctcgtggcgatggcgcaatcctcaccgcaacgcagaacggttatggtaaacgtaccgcagtggcggaatacccgactaagtcgcgtgcgacgaaaggggttatctccatcaaggttaccgaacgtaacggtttagttgttggcgcggtacaggtagatgactgcgaccagatcatgatgatcaccgatgccggtacgctggtacgtactcgcgtttcagaaatcagcatcgtgggccgtaacacccagggcgtgatcctcatccgtactgcggaagatgaaaacgtagtgggtctgcaacgtgttgctgaaccggttgacgaggaagatctggataccatcgacggcagtgccgcggaaggggacgatgaaatcgctccggaagtggacgttgacgacgagccagaagaagaataa

SEQ ID NO: 81 - DNA, 1629 bp, Escherichia coli
atgaaaactcgcgactcgcaatcaagtgacgtgattatcattggcggcggcgcaacgggagccggaattgcccgcgactgtgccctgcgcgggctgcgcgtgattttggttgagcgccacgacatcgcaaccggtgccaccgggcgtaaccacggcctgctgcacagcggtgcgcgctatgcggtaaccgatgcggaatcggcccgcgaatgcattagtgaaaaccagatcctgaaacgcattgcacgtcactgcgttgaaccaaccaacggcctgtttatcaccctgccggaagatgacctctccttccaggccacttttattcgcgcctgcgaagaagcagggatcagcgcagaagctatagacccgcagcaagcgcgcattatcgaacctgccgttaacccggcactgattggcgcggtgaaagttccggatggcaccgttgatccatttcgtctgaccgcagcaaacatgctggatgccaaagaacacggtgctgttatccttaccgctcatgaagtcacggggctgattcgtgaaggcgcgacggtgtgcggtgttcgtgtacgtaaccatctcaccggcgaaactcaggcccttcatgcacctgtcgtggttaatgccgctgggatctgggggcaacacattgccgaatatgccgatctgcgcattcgcatgttcccggcgaaaggatcgctgctgatcatggatcaccgcattaatcagcatgtgatcaaccgctgccgtaaaccttccgacgccgatattctggtgcctggcgataccatttcgctgattggcaccacctctttacgtattgattacaacgagattgacgataatcgagtgacggcagaagaggttgatattctgctgcgtgaaggggaaaaactggcccccgtgatggcgaaaacgcgcattttgcgggcctattctggcgtgcgcccgctggttgccagcgatgacgacccgagcggacgtaacgtcagccgtggcatcgtgctgctcgaccatgctgaacgcgatggtctggacggatttatcaccatcaccggtggcaaactgatgacctatcggctgatggctgaatgggctaccgacgcggtatgccgcaaactgggcaacacgcgcccctgtacgaccgccgatctggcacttccgggttcacaggaacccgctgaagttaccttgcgtaaagtcatctccctgcctgccccgctgcgcggttctgcggtttatcgtcatggcgatcgcacgcctgcctggctgagcgaaggccgtctgcaccgtagcctggtatgtgagtgcgaagcggtaactgcgggtgaagtgcagtacgcggtagaaaatttaaacgttaatagcctgctggatttacgccgtcgtacccgtgtggggatgggtacctgccagggcgaactctgcgcctgccgcgctgctggactgctgcaacgttttaacgtcacgacgtccgcgcaatctatcgagcaactttccaccttccttaacgaacgctggaaaggcgtgcaacccatcgcctggggagatgcactgcgcgaaagcgaatttacccgctgggtttatcagggactgtgtggtctggagaaggagcagaaagatgcgctttga

SEQ ID NO: 82 - DNA, 1203 bp, Escherichia coli
atgttaaaagtggaaatgctatccaccggggatgaagtgttacacgggcaaatcgttgacactaacgctgcctggctggccgattttttctttcatcaggggttgccattatctcgccgcaatacggtgggggataaccttgatgacttagtcaccattcttcgcgaacgtagtcagcacgccgatgtgctgatcgttaacggcgggctgggaccgaccagcgatgatttaagcgcactcgccgctgcgacagcaaaaggtgaaggcctggtgctgcatgaagcctggctcaaagagatggaacgctatttccacgaacgtggacgagtaatggcaccgagcaaccgtaaacaagcggagctgcctgccagtgctgaatttatcaataacccggtaggcaccgcctgtggttttgccgtgcagcttaatcgttgcctgatgttctttactcccggcgtaccgtcagaatttaaggtgatggtcgagcacgaaatcctgccgcgtctgcgcgagcgtttttctttaccacagccgccggtttgtctgcgtttaactacctttggtcgttcggaaagcgatctggcacaaagcctggacactctacaactgccgccgggcgtaacaatgggctatcgctcctcaatgccgatcatcgaactgaaactcaccggaccggcaagcgagcaacaggcgatggaaaaactgtggctggacgttaaacgtgttgccggacagagcgtgattttcgaaggcaccgaaggactgcccgcgcagatcagtcgcgaattgcaaaaccgccagttcagcctgacgttgagcgagcaattcaccggtggtttattggctttgcaactttctcgcgcaggtgctccactgctggcgtgtgaagtggttccttcacaggaagaaaccctggcgcaaactgcgcactggattacagaacggcgagccaaccattttgccgggctggcactggctgtttcgggtttcgagaacgagcatctcaactttgcgctagccacgccagatggcactttagctctgcgtgtgcgtttcagcactacacgctatagcctggctatccgtcaggaagtgtgcgcaatgatggcactgaatatgctacgccgttggttaaacggccaggacattgccagtgagcatggctggattgaggttgttgagtccatgaccttatccgtctga

SEQ ID NO: 83 - DNA, 996 bp, Escherichia coli
atgatacaacctatttccggccctcctcctgggcaaccaccaggtcagggagataacctgccgtctggcgcgggcaatcagcctttatccagtcagcaacgtacttcgctggaaagcttaatgacgaaagtgacctcactgacgcaacagcaaagagcagaactgtgggcgggtatcaggcacgatattggtctgtcgggagattcaccgctgctttcgcgtcactgccctgccgctgagcataatctggcgcaacgtctgctggccgcgcaaaaaagccattctgcccgccagcttttagcgcaattaggggagtatttacgtctggggaataatcgtcaggcggtcacggattatatccgtcataactttggtcagacgccgctgaatcagctctcaccggagcaattaaaaaccattctcaccctgttgcaggaagggaagatggttattccgcaaccgcagcagcgcgaggcgaccgatcgtcctctattaccggcggagcacaatgcgctcaaacagctggtgaccaaacttgcggcggcaacgggggagcccagcaaacagatctggcaatcgatgctggaactttccggggtgaaagatggcgagttaattccagcgaaactgtttaaccatctggtgacctggctgcaggcgcgtcagacgctaagccagcaaaatacgccgacgctggaatcactacaaatgacgctaaaacaacctttagatgccagtgaactggcggcgttatcggcatatatccagcaaaaatatggcctttctgcgcaatcatcgctttcttctgcccaggccgaggatattcttaatcagctttatcaacggcgggttaaagggattgatccgcgtgatatgcaaccgctgcttaatccttttccaccgatgatggacacgttgcaaaatatggcaacgcgtcccgcgctgtggatactgttagtcgcgattatcctgatgctggtctggctggttcgttaa

SEQ ID NO: 84 - DNA, 1086 bp, Escherichia coli
atggctggaaacacaattggacaactctttcgcgtaaccaccttcggcgaatcgcacgggctggcgctcggctgcatcgtcgatggtgttccgccaggcattccgctgacggaagcggacctgcaacatgacctcgaccgtcgtcgccctgggacatcgcgctataccacccagcgtcgtgagccagatcaggtcaaaattctctccggtgtttttgaaggtgttactaccggcaccagcattggtttgttgatcgaaaataccgatcagcgttctcaggattatagtgcgattaaggacgttttccgtcctggccatgccgattacacctacgaacaaaaatacggtctgcgcgattatcgcggcggtggacgttcttccgcccgtgaaaccgccatgcgcgttgcagcaggggcgattgccaaaaaatatctcgctgagaaatttggcatcgaaattcgcggctgcctgacccagatgggcgacattccgctggaaatcaaagactggtcgcaggtcgagcaaaatccattcttctgcccggacccggacaaaatcgacgcgttagatgaactgatgcgcgcgctgaaaaaagagggcgactctattggcgcgaaagtcaccgttgttgccagtggcgttcctgccgggcttggtgagccggtctttgatcgcctggatgccgacatcgcccatgcgctaatgagcattaacgcggtgaaaggcgtggaaattggtgatggttttgacgtggtggcgctgcgtggcagccagaaccgcgacgaaatcaccaaagacggtttccagagtaaccatgcgggcggcattctcggcggaattagcagcgggcagcaaatcattgctcatatggcactgaaaccgacctccagtattaccgtgccggggcgcaccattaaccgctttggcgaagaagttgagatgatcaccaaaggccgtcacgatccctgtgtcgggatccgcgcggtgccgatagcagaagcgatgctggcgatcgttttaatggatcacctgttacggcagcgggcgcaaaatgccgatgtgaagactgatattccacgctggtaa

SEQ ID NO: 85 - DNA, 2640 bp, Escherichia coli
atgcctgaccattctcttttccgactgcgggtacttccctgctgcgttgcattggcaatgtccgggagttatgtcaatgcctgggctgaaaatgaaattcagtttgattcccgttttctggagttaaaaggcgacacaaaaatcgatctgaagcgattttccagccagggttatgtcgaacctgggaaatacaatttacaggttcaactaaataaacagccgctgacggaagaatacgatatttactggtacgcctctgagaacgatgccagtaaaacctatgcctgcctgacgcctgaactggtcgcgcagtttggcttaaaagaggatgtggcaaaaaacctgcaatggatccacgacggcaaatgcctgaaacccggtcaactggaaggcattgatattaaagctgacctgagtcagtcagcgttagtcatttcattaccccaggcttaccttgaatataccgacatcaactgggatccgccttcacgctgggatgacggtatatctggtttaattgctgactacagtattaccgcccagacacgacatgaagaaaatggcggggatgacagcaatgaaattagcggtaacgggacggttggggtgaacctcggcgcatggcgtcttcgtgccgactggcagactgattatttgcatagtaaaagcaatgatgacgatgttatcaacggtgatgacacgcaaaaaaactgggagtggagccgctactacgcctggcgagccttaccgtcgctaaaagccaaacttggccttggcgaagactacctgaattctgatattttcgacggctttaactacgtgggtggcagtatcagcaccgacgatcaaatgttgccgccgaatctgcgcggctatgcgccggatatctccggcgtggcgcacaccaccgcgaaagtgaccgtcagccagttgggccgcgtcatctacgaaacccaggtcccggcggggccgttccgcatccaggatcttggcgattcggtctccggtacgctgcatatccgcattgaagaacagaacggtcaggtgcaggaatatgacatcaacaccgcctcgatgccgttcctgactcgccccggccaggtgcgctataaactgatgatgggccgcccgcaggagtgggggcaccacgtggaaggcggtttcttctccggcggcgaagcttcctgggggattgccaacggctggtcgctatacggcggggcgctggcagatgaacactatcagtcggcggcgcttggcgtcggtcgcgacctgtctgtgtttggtgcggtggcctttgatatcacccactcgcatacccgtctggataaagagaccgcctacgggaaaggttcactggacggcaactcgtttcgcctgagctattccaaagacttcgatgaactgaacagccgcgtcacttttgccggataccgcttctcggaagagaacttcatgaccatgagcgagtatctcgatgccagcgacagcgaaatggtgcgcaccggcaacgacaaagagatgtacaccgccacctataaccagaacttcagggatgccggtgtgtctgtttatctcaactacacccgccatacctactgggatcgcgacgaacagaccaactacaacgtcatgctctcgcactacttcaacctgggcagtatccgcaacatgagcatttccatgaccggataccgctacgagtatgacaaccaggccgataaaggtgtgtacatatcgctcagtatgccgtggggtgacagcagcaccatcagctataacggcaactacggcagcggttcggacagcagccaggtggggtatttcagccgtgtcgatgacgcaacccattaccagttgaacgtaggcaccagcgacaatcactccagcgttgacggttattacagccacgacggatcgctggcgcaggtcgatctcagcgctaactaccatgaagggcagtacacctcggcgggtatttccttacagggcggcgcgacgctcaccgcacaaggtggcgcgctccaccgtacccagaatatgggcggtacgcgtctgctgattgatgccgacggtgtggctggtgttccggtggaaggaaatggcgcggcggtttacaccaatatgttcggtaaggcagtggtggcagacgtcaacaactactaccgcaaccaggcgtatatcgacctaaacaacctgccggaaaacgccgaagccacccagtccgtggtgcagggcacgcttaccgaaggggccattggctaccgtaagttctcggtgatcagcgggcaaaaagcgatggcggtgctgcgtctgcaagatggcagttatccgccgtttggcgcggaagtgaaaaacgacagcgcgcagaacgtcggtctggttgacgatgacggcaacgtctacctcgcgggcgtaaaacctggcgagcatatgatcgtttcatggggcggtgtggcccactgcgatattcatctgcctgacccgctgccagccgatctgttcaatggcctgttattaccatgccagcaaacaggggcgatatctccttcgatgcctcatgaaattaagccggtgatccaggagcagacccagcaggtgatgccaacggaagcgccagtatcggtatcagccaattaa

SEQ ID NO: 86 - DNA, 1311 bp, Escherichia coli
atgggtcaggttttaccgctggttacccgccagggcgatcgtatcgccattgttagcggtttacgtacgccttttgcccgccaggcgacggcttttcatggcattcccgcggttgatttagggaagatggtggtaggcgaactgctggcacgcagcgagatccccgccgaagtgattgaacaactggtctttggtcaggtcgtacaaatgcctgaagctcccaacattgcgcgtgaaattgttctcggtactggaatgaatgtgcataccgatgcttacagcgtcagccgcgcttgcgctaccagtttccaggcggttgcaaacgtcgtagaaagcctgatggcggggactatccgagcggggattgccggtggggcagattcctcttcggtattgccaattggcgtcagtaaaaaactggcgcgcgtgctggttgatgtcaacaaagcccgcacaatgagccagcgtctgaaactcttctctcgcctgcgtttgcgcgacttaatgcccgtaccacctgcggtagcagaatattctaccggcttgcggatgggcgacactgcagagcaaatggcgaaaacctacggcatcacccgagaacagcaagatgcattagcgcaccgttcgcatcagcgtgccgctcaggcatggtcagacggaaaactcaaagaagaggtgatgactgcctttatccctccttataaacaactgctcgcggaagacaacaatattcgcggtaattcctcgcttgctgatttcgcaaagctgcgtccggcgtttgatcgtaaacacggaacggtaacggcggcgaacagtacgccgctgaccgatggcgcagcggcggtgatcctgatgactgaatcccgggcgaaagaattagggctggtaccgctgggatatctgcgcagctacgcatttaccgctatcgatgtctggcaggacatgttgctcggtccagcctggtcaacaccgctggcgctggagcgtgccggtttgacaatggcagatctgacattgattgatatgcacgaagcctttgccgcccagacgttggccaatattcagctactgggtagtgaacgttttgctcgtgaagcgctggggcgtgcacatgccactggcgaagtggacgatagcaaatttaacgtgcttggcggttcgattgcttacgggcatcccttcgcggcgaccggcgcgcggatgattacccagacattgcatgaacttcgccgtcgcggcggtggatttggtttagttaccgcctgtgctgccggtgggcttggcgcggcaatggttctggaggcggaataa

SEQ ID NO: 87 - DNA, 1038 bp, Escherichia coli
atggatttatcgctattgaaagcgttgagcgaggcagatgcgatcgcctcctcggaacaggaagtgcggcagatcctgctggaagaagcggatcgcctgcaaaaagaagtgcgatttgatgggctgggatcggtgctgatccgcctcaatgaatcgacaggtccgaaggtgatgatctgtgcgcatatggacgaagtgggatttatggtgcgcagcatctcccgcgaaggggcgattgatgtgctgccggttggcaatgtacgcatggctgcccgccagctgcagccggtgcgcatcaccacccgtgaagagtgcaaaattccaggcctgcttgacggcgaccggcaggggaatgatgtcagcgccatgcgcgtggatattggcgcgcgctcgtatgacgaagtgatgcaggcgggaattcgtccaggcgatcgcgtcacgttcgataccacttttcaggttctcccccaccagcgggtgatggggaaagcctttgatgaccgcctcggttgctacctgctggtgacgttactgcgcgaactacacagcgctgaactgcctgcggaagtgtggctggtggccagttccagcgaagaggtggggttacgcggcgggcaaactgccacccgcgcggtgtcgccggacgtcgccattgtccttgataccgcctgctgggcgaaaaactttaattatggcgcggctaaccatcgccagattggtaacggcccgatgctggtgttaagcgacaagtcactgattgcgccgccaaaactcaccgcctggatcgaaaccgtggcggcagaaattggcgtgccgttacaggcggatatgttcagtaacggcggcacggacggtggagcggtgcacttaaccggtactggcgtacccacagtggtgatggggcctgccacccgccacggacattgcgccgcgtcgattgccgattgccgtgacattttgcagatggagcaacttttatctgcccttattcaacgtcttacgcgtgagacggttgttcaactgacggatttcagatga

SEQ ID NO: 88 - DNA, 1086 bp, Escherichia coli
atgacattactcgcttcgctgcgcgactggcttaaggcgcaacaactggatgcggtgcttctctcctcacggcagaacaaacagccgcatctggggatctccaccggatcaggctatgtgctgattagccgtgaaagtgcgcacattctggtggactcgcgctattacgcggatgtagaagcccgcacgcaaggttaccagctgcatttgcttgacgcgacgcacacgcttacaaccatcgccaggcaaatcattgccgatgagcagttgcaaacgctcggttttgaaggccagcaggtgagttgggaaaccgcgcatcgctggcagtctgaactcaatgcgaaactggttagcgccacgccggatgtgctgcggcaaatcaaaacgccagaggaggtggagaaaatccgccttgcctgtgggattgccgatcgcggtgcagagcatattcgccgctttattcaggcggggatgagcgagcgcgagatagccgctgaactggagtggtttatgcgccagcagggcgcagaaaaaacctcttttgacaccattgtcgccagtggctggcgtggggcgctgccgcacggcaaagccagcgacaagattgttgcagcgggcgagtttgtcactctcgatttcggtgcgctctatcagggctactgctctgatatgacgcgcaccttgctggtgaatggcgaaggggtgagcgccgaatctcacccgctgtttaacgtctatcagattgttttgcaggcacagctcgcagcaatctctgcaattcgccccggcgtgcgctgccagcaggttgacgaagccgcgcgtcgggtgattaccgaggcaggttttagccactatttcggtcataacaccgctcatgctatcggcattgaagttcatgaagatccgcgtttttcaccgcgggacaccacgacgctacagccaggcatgttactgaccgtggagccggggatttatttgccagggcaagggggcgtgcgcatcgaggatgttgtgctggtcaccccgcaaggcgcagaagtgctctacgccatgccgaaaacagtgttgctcacgggagaggcataa

SEQ ID NO: 89 - DNA, 702 bp, Escherichia coli
gtgaaaaaactcatcacagcgaatgatattcgtgaagcacacgcgcgcggcgaacaggcaatgtccgtggttctgcgcgccagcattattaccccggaagcccgtgaagtggcggatctactgggttttaccatcaccgaatgtgatgaattgatcccggtaacggcgtccgtgcccgccagcgtgccagccgataaaaccgaaagccagcgcatccgcgaaaccattatcgcccagctaccggaaggccagtttaccgaaagcctggtcgcgcagctgatggaaaaagtgatgaaggaaaaacagtcgctggagcagggtgcaatgcagccgagcttcaaatcggtgaccggcaaaggcggcatcaaagtgattgatggtagcagcgtcaagtttggtcgctttgatggcgcacaaccgcattgcgtgggcttgactgatcttgtgaccggagacgacggcagcagcatggccgccggttttatgcagtgggagaacgcattcttcccgtggaccctgaactacgacgaaatcgacatggtgctggaaggggagctccatgttcgccacgaaggcgaaaccatgatcgctaaagcaggcgacgtgatgtttatcccgaaaggctccagcatcgaatttggtacgacatccagcgtgaaattcctgtatgtcgcctggccggctaactggcaatccctatga

SEQ ID NO: 90 - DNA, 1980 bp, Escherichia coli
atgaatcgttttattatggccaacagtcagcaatgtctgggttgtcatgcttgtgaaatcgcttgtgtcatggctcacaatgatgagcaacatgtcctgagccaacaccattttcatccccgaattacggttatcaaacatcagcagcaacgtagtgcagtgacctgtcaccattgtgaagatgcgccctgcgcccgtagctgccctaatggcgcaatcagccacgttgatgacagcattcaggtcaatcagcaaaagtgtattggctgtaaatcctgcgtggtggcctgtccgtttggtacgatgcaaatcgtcctgacacccgtcgcagcgggcaaagttaaagccacggcgcataaatgcgacctttgtgcagggcgcgaaaacggtcctgcctgtgtcgagaattgcccggcggacgcgctgcagctggtcactgacgccgcactctcaggcatggcgaaatcccgccgcttgcgtaccgcacgtcaggaacatcaaccgtggcatgccagtaccgctgcacaagaaatgccggtaatgagtaaagtcgaacaaatgcaggcaacgcccgcgcgtggcgagccggataaactggcgattgaagcgcgcaaaaccggttttgatgaaatttatctgccattccgtgccgatcaggcacaacgggaagcctcgcgctgccttaaatgcggcgagcacagcgtttgtgaatggacctgcccgctgcataaccatataccgcagtggattgaactggtgaaagccggaaacatcgacgccgccgtcgagctttctcacctgaccaacaccctgccggaaattaccggacgcgtttgtccgcaagaccgtttgtgtgaaggtgcctgtactattcgcgatgagcacggtgcggtaactatcggcaacattgaacgctacatttcagatcaggcgttggcgaaaggttggcgtcctgacttaagccatgtcaccaaagtggacaagcgggtggcgattatcggtgcaggtccggcagggctggcctgtgcggatgttctgatccgcaatggcgtggcggtgacggtgtacgatcgccatccagaaatcggtggcttgctcactttcggcattccttctttcaaactggataaatccctgctggcacgtcgtcgggaaatcttcagcgcgatggggattcacttcgaactcaattgtgaagtgggtaaagatgtctctttggattcgcttttggaacaatacgacgcggtcttcgttggcgtaggcacttaccgttccatgaaagcgggtttacccaatgaagatgcgccgggcgtttatgacgcgctgccgttcctcatcgccaacactaaacaggtgatggggctcgaagagctaccggaagagccgtttatcaataccgccggacttaacgtcgtggtactgggcggcggcgacaccgcgatggactgtgtgcgtactgcgctgcgccacggcgcgagtaacgtcacctgcgcttatcgtcgtgatgaagctaacatgccaggctcgaagaaagaggtgaagaacgcccgcgaagagggggccaacttcgaatttaacgtccagccggtggcgcttgagctgaatgaacaaggtcacgtctgcgggattcgtttcctgcgcacgcgtcttggcgagccggatgcccaggggcgtcggcgtccagtgccggtggaaggcagtgaatttgtcatgccagccgacgcggtgattatggcgtttggcttcaatccgcacgggatgccgtggctggagtcgcacggtgtaacggtagacaaatggggccgcatcatcgcggatgtggaaagccagtaccgttaccagaccaccaatccgaaaatcttcgccggtggcgacgccgtgcgtggtgcggatctggtggttaccgcaatggcagaaggacgtcatgcggcacaggggattattgactggctgggggtaaaatcagtcaaatctcactga

SEQ ID NO: 91 - DNA, 1014 bp, Escherichia coli
atgaatactgaagccacgcacgaccaaaatgaagcacttactaccggcgctcgcctgcgtaatgctcgcgaacaactaggacttagtcagcaggccgttgccgagcgactttgcctgaaggtttccacggtacgcgacattgaagaagataaggcacccgccgatcttgcttcaacattcctgcgcggatatatccgctcttatgcgcgtctggtacatattccagaagaagaactgctgccagggctggaaaagcaggctccactacgggctgcaaaagttgcgccgatgcagagtttttccctcggtaaacgccgcaaaaaacgcgacggctggctgatgaccttcacctggctggtgttgtttgtggttatcggcctgagcggtgcctggtggtggcaagaccacaaagctcagcaggaagagatcaccactatggccgatcaatcttcggcggaactgagcagtaatagcgagcaggggcagagtgttccgttaaatacgtcgacaactacagacccggctacaacgtccacgccgccagcgtctgtggatactaccgcaaccaacacgcaaacacctgtcgtaactgcgccagcaccagctgttgatccgcaacagaatgcggttgtttcgccttcgcaggcaaatgttgataccgccgcgaccccggcaccaacggcagcaacaacgccagatggtgctgcgccgttgccaaccgatcaggctggcgtgaccacgccggtggctgatccgaatgcgctggtgatgaactttactgccgattgctggctggaggtcactgatgctaccggtaaaaaattgtttagcggtatgcagcgtaaagacggtaatttgaacttaaccggccaggcaccgtacaaactgaaaattggtgcgccagccgcagtacagatccagtatcaagggaaacctgtcgatctgagtcgttttatcagaactaaccaggttgcgcgtctgaccctcaatgccgaacaatcaccggcgcagtaa

SEQ ID NO: 92 - DNA, 4962 bp, Escherichia coli
atgaaaaagttacgcgtagccgcctgcatgctaatgctggcgctggcagggtgcgacaacaacgataacgcgccaacagcggtgaaaaaagatgcgccttctgaagttactaaagcggcctcttcagaaaacgcgagttcagcaaaactctccgcgccagagcgacaaaaactggcccaacagagtgccggtaaggcgctgacattgctggatctctctgaagtccaacttgatggtgcagccacgctggtgctgacgttctccatccctctcgacccggatcaggatttctcacgcgttattcatgtcgtcgataaaaaaagcggcaaagtggatggtgcctgggagctatcagataatcttaaagagctgcgtttacgccacctcgaaccgaaacgtgatttgatcgttacaattggcaaggaggtcaaagcactcaacaacgcaaccttcagtaaagattacgaaaaaactataactacccgcgacatccaacccagtgtcggttttgccagccgtggttcgctgctgcctggtaaagtcgttgaagggctgccggtaatggcgctcaacgttaataatgtcgatgttaacttcttccgcgttaagccagaatctctgccagcattcattagccaatgggaataccgcaattcgctggcgaactggcagtcagacaaactgctgcagatggcggatctggtctacaccggacggtttgatctcaatcctgcgcgtaacacccgtgaaaaattattgctgccgctgggcgatatcaaaccgcttcagcaggcgggcgtgtatctggctgtgatgaatcaggctggacgttacgattacagtaatcccgcgacgctgtttacgttaagtgatatcggcgtttcagctcaccgttatcacaatcgtctggatatctttacccaaagtctggaaaacggcgcggcccagcaaggaattgaagtctctttattaaatgagaaagggcagactctgactcaggcaaccagtgacgctcaggggcatgtgcagctggaaaatgataaaaacgccgcattattgctggcacgtaaagacggtcagacaacgctactcgatttaaaacttccggcgctggacttagcagaatttaacattgctggcgcgccaggctatagcaaacagtttttcatgtttggcccgcgcgatctttatcgcccgggtgaaacggtaatcctcaatggtttgctgcgtgatgcagacggtaaagcgttgcccaatcaacccatcaagttagacgtgattaaacccgatgggcaggtactcaggagcgtcgttagtcagccggaaaatggcctctaccactttacctggccactcgatagcaatgcggcaaccggtatgtggcatattcgcgctaacacgggcgataaccagtatcggatgtgggatttccacgtcgaagattttatgccagagcgtatggcgctgaatctgaccggtgagaaaaccccgcttacgccgaatgatgaagtgaaattctccgtggtgggatactacctgtacggtgcgcctgctaatggtaatactttgcaagggcaacttttcctgcgcccactgcgtgaggctgtgtcagccttacctggttttgaattcggcgatatagctgccgaaaacctttcccgcacgctggatgaagttcagttgacgctggatgataaagggcgcggcgaagtttctacagaaagccagtggaaggaaacgcattccccattgcaggttattttccagggcagtttgctggaatcgggcggtcgcccggtgacgcgccgcgctgagcaggctatctggcctgccgatgcattgccggggatccgtccgcagttcgcctcgaaatcggtttacgattatcgcactgacagcacggtgaaacagcccattgttgatgaaggcagtaacgccgcttttgacatcgtttatagcgatgcgcaaggcgtgaaaaaagccgtgtcgggcttgcaggtgcgcctgattcgcgaacgccgcgattactactggaactggtcagaagatgaaggctggcaatcacagtttgatcaaaaagatctgattgaaaatgaacaaactctggatctgaaagcggacgaaaccggcaaggtcagtttcccggtagagtggggcgcttatcgtctggaagtcaaagcgccgaatgaagcggtcagtagtgttcgtttttgggctggctatagctggcaggataatagcgacggtagcggcgcagtgcgacccgaccgtgtcacgctgaaactggataaagccggttatcgccctggcgataccattaagttgcatatcgccgcgccaacggcgggtaaaggttatgcgatggtcgagtccagtgaagggccgctgtggtggcaagagattgatgttccggctcaagggctggatctgacgattccggtcgataaaacctggaatcgtcatgatctttatttgagtacgctggtggtgcgtcctggcgataaatctcgctccgcgacgccaaaacgcgcggttggtgtgttgcatctgccgcttggtgatgaaaaccgtcgcctcgatctggcgctggaaacaccagcaaaaatgcgtcccaatcaaccattaaccgtgaaaattaaagccagcactaaaaatggcgagaagcctaaacaggtgaatgtgctggtgtctgccgttgatagtggtgtgctgaatattactgactacgtcacgccagatccgtggcaggcgttctttggtcagaaacgctatggcgcagacatttacgatatttacggtcaggttattgaaggtcaggggcgtctggcagctctgcgtttcggtggcgatggtgatgagctgaaacgtggtggtaaaccgccggtcaatcacgtcaatattgtcgcgcagcaggcgctgccggtaacgctcaacgaacagggcgaaggctcggttacactgccgattggcgattttaacggtgaattgcgcgtcatggcgcaagcctggacggcagatgaattcggtagcaacgaaagcaaagtgatagttgccgcaccggtgattgctgaactgaacatgccgcgctttatggcgagtggcgataactcgcgtctgacgctggatatcactaatcttaccgataaaccgcaaaaactgaacgttgccctgaccgccagtggtttgcttgaactggtcagcgattcacccgcagccgttgaattagcgccaggtgtgcgtactacgctgtttatcccggtgcgagcattgccgggttatggcgatggagaaattcaggccaccattagcgggttagcgttaccgggtgaaaccgttgccgatcagcataagcagtggaaaatcggcgtccgtccggcgttcccggcacaaacggttaattacggtacggcgttacagcctggtgagacatgggcgattccggcggatggattgcaaaacttctcgcctgttacgctggaagggcaattgttgttgagcggcaaaccaccgctgaacatcgcacgttatatcaaagagttaaaagcgtatccgtacggctgtcttgagcaaaccgccagcggcctgttcccgtcactttataccaacgcagcccaactgcaggcgttgggcatcaaaggcgacagtgatgagaaacgccgtgcatcggtcgatatcggcatttcccgtttgctgcaaatgcaacgtgataacggcggctttgcgctgtgggataaaaacggtgacgaagagtactggctgacggcttacgtgatggatttcctggtccgcgcaggcgaacagggttacagcgtgccgacagacgccattaaccggggtaatgagcgtctgctgcgctatttacaagatccgggcatgatgtcgatcccgtacgcggataatctcaaagccagtaaattcgccgtacagtcttacgctgcgctggtgttggcccgtcagcaaaaggctccgctgggtgcgctgcgtgaaatctgggagcatcgtgcagatgccgcttctggtttaccgctgctgcaacttggcgttgcgctgaaaaccatgggtgatgcgacgcgtgatgaagaagcgattgcgctggcgctaaaaacgccgcgtaatagtgatgagcggatatggctgggtgattacggtagtccactgcgcgacaacgcgttgatgctctccttgctggaagagaacaaactgctacccgatgagcagtactccctgctgaacacactttcgcagcaggcgtttggtgaacgctggctatcgacgcaggaaagtaacgcgttgttcctggctgcccgtacgattcaggatttaccaggtaaatggcaggcgcaaacctctttctcagctgagccgctgacaggcgagaaagcgcaaaacagcaatctgaatagcgatcaacttgccaccttgcaggtgaccaacagtggcgagcagccgttatggctgcgtgtggatgccagcggttatccgcaatccgcacctttaccggcgaacaatgtgctgcaaattgagcgtcatattcttggtactgatggtaagagcaaatcgctggactcgttacgtagcggcgatctggtgctggtctggttgcaggtaaaagctagtaacagcgtgccggatgcgttagtcgtggatctgctgcctgcgggtctggaactggaaaaccagaatctggcgaacggtagcgccagcctggagcaaagtggtggcgaagtgcagaacttactgaaccagatgcagcaggcgagtattaagcacattgagttccgtgacgatcgctttgtggcggcggttgccgttgatgaataccaaccggtaacgctggtgtatctggcgcgggcggtgacgccgggaacgtatcaggtaccgcaaccgatggtggaatcaatgtatgttccccaatggcgggcgaccggcgcggctgaagatttgctgattgtcagaccgtaa

SEQ ID NO: 93 - DNA, 984 bp, Escherichia coli
atgcctaaaaaaatgagaacaacccgtaatctattattaatggctacgctattaggtagcgcactatttgccagagctgcggataaagaaatgaccattggcgcaatataccttgatactcagggatattacgctggagtgcgtcagggagttcaggatgcggcaaaagattcttcagtacaggtacagttaattgaaactaacgcccagggtgatatttcgaaagaaagtacctttgttgataccctcgtggcgcgtaatgtcgatgctattattttatcggcagtgtctgaaaatggcagtagccgtaccgttcgtcgcgccagtgaagcgggtattccggtgatttgctacaacacctgtattaatcaaaagggggtcgataaatatgtctcggcgtatctggtgggtgacccgctggaatttggtaaaaaactgggtaacgctgccgccgattattttattgccaataaaattgaccagccgaaaattgccgtcatcaattgcgaagcctttgaagtttgtgtgcagcgacgtaaaggatttgaagaagtattaaaatcccgcgttcccggcgcgcaaattgtcgctaatcaggaagggactgttttagataaagcgatttccgttggtgaaaaactgattatctccacgccggatctcaacgccattatgggggaatcgggcggtgcgacactcggcgcggtaaaagcggtacgtaatcaaaatcaggccggaaaaattgctgttttcggttcggatatgacaaccgaaattgctcaggagctggaaaacaatcaggtgctgaaagcggtagtggatatttccggtaagaaaatgggcaatgctgttttcgcgcaaacattgaaggttatcaataaacaagccgacggtgaaaaagtgattcaggtgcctatcgatctctataccaaaacggaagacggtaaacagtggctggcaacgcacgttgatggtctgccctaa

SEQ ID NO: 94 - DNA, 3375 bp, Escherichia coli
ttgcgtgattattccgcgaaaacattgccagattgttcaatacactgccacaaatcttttaattcagtatgtcttgttaatattgagggcaccatgactccagtaaaagtgtggcaagagcgcgttgagatcccgacctatgaaaccgggccgcaggatatacatcccatgttcctggaaaatcgcgtttatcagggatcgtccggcgcggtttatccctacggcgtgaccgatacgctgagcgagcagaaaaccctgaaatcctggcaggcggtgtggctggaaaacgactacatcaaagtgatgatcctgccggaattgggcggtcgggtgcatcgcgcatgggataaagtgaaacagcgcgattttgtctatcacaatgaagtcattaaacctgcgctggtggggctgctgggaccgtggatctccggcgggattgagtttaactggccgcaacaccatcgcccgaccacctttatgcccgttgatttcaccctcgaagcccatgaagacggcgcacagacggtgtgggtaggcgaaacggagccgatgcatggtttacaggtgatgacaggtttcaccctgcgccctgaccgggcggcgctggaaatcgccagccgcgtctataacggcaacgccacgccgcgtcatttcttgtggtgggccaacccggcagtgaaagggggtgaagggcatcagagcgtctttccgccggatgtaacggcggtgtttgatcacggcaaacgggccgtctccgctttccctatcgccaccggcacttactacaaagtggactactccgctggagtggacatttctcgctataaaaatgtgcccgttccaacctcatatatggctgaaaaatcacagtacgattttgttggcgcgtggtgtcacgatgaagatggcggtttgctacacgttgccaaccaccatattgcgccaggtaaaaagcagtggagctggggacacagtgaatttggccaggcgtgggataagagcctaactgataataacggcccgtatatcgaactgatgaccggtatttttgccgataaccagcctgattttacccggcttgatgcttacgaagagaagcgttttgagcagtttttcctgccttaccattctctgggcatggtgcaaaacgcctcccgcgatgcggtaatcaaactccagcgtagtgagcgggggattgagtgggggctgtatgccatctctccgttgaacggataccgcctggcgatccgcgaaatcggcaaatgcgacgcgttgctcgatgatgccgtggccctgacaccagcgaccgccatccagggcgtgttacacggtatcaatcctgaaagactgaccattgagctctctgatgccgacggcaatattgtactgagttatcaggaacatcagccgcaagagttgccgttgccggacgtcgccaaagcgccactgtcagcacaagacattaccagtacagatgaagcctggtttatcggtcagcatctggagcaatatcatcacgccagccgttcaccgttcgattactacctgcgcggcgtggcgctggatccgctggattaccgctgtaatctggcgctggcgatgctggagtataaccgcgcagatttcccgcaagcggtggcgtatgccactcaggctctgaaacgcgcacatgcgctgaacaaaaatccgcagtgcggacaggcgagtttgattcgcgccagtgcttacgaacgtcagggacaatatcaacaagccgaagaggatttctggcgtgcggtctggagcggcaacagtaaagccggaggctattatggtctggcacgactggcggcgcgtaatggtaacttcgacgcgggtctggatttttgccaacaaagtcttcgcgcctgcccaatcaatcaggaagtgctttgcctgcataatctgctgctggtgttaagtggtcgtcaggacaacgcgcgtttgcagcgcgagaaactgctgcgcgattatccgctgaacgccactctgtggtgcctgaactggttcgatggtcgtagcgaatcagctctcgcgcagtggcgcggtctgtgtcagggacgcgacgttaacgccctgatgaccgccgggcaactgattaactggggaatgcccaccctcgcggcagagatgctgaatgcactggactgccagcgcacgctgccgctttacctgcaagccagcttgctgccgaaagccgaacgtggcgaactggtcgcaaaagccattgatgtcttcccgcagtttgtccgtttcccgaatacgctggaagaagtggcggcgctggagagtattgaagagtgctggtttgctcgccatttactggcctgcttctactacaacaaacgtagctacaacgaagccattgccttatggcaacgttgcgtagagatgtcgccggagtttgccgacggctggcgcgggttagcgatccatgcgtggaataagcaacacgattatgagctggccgcgcgttatcttgataatgcttatcagcttgcgccgcaggatgcacgtctgcttttcgaacgggatttgcttgataagctaagtggaaccacaccggagaaacgactggcgcgtctggaaaataatctggaaattgcgctgaaacgcgacgacatgaccgcagaactgctcaatttgtggcatctcacggggcaggcagacaaagcggcggacattctcgccacgcgcaaattccacccgtgggaaggcggggaagggaaggtcaccagtcagtttatcctcaaccagttattacgcgcctggcagcatcttgatgccagagagccgcagcaggccagcgaactgcttcatgccgcgctgcattatccggagaatttaagcgaaggccgtttaccggggcaaactgataacgacatctggttctggcaggcgatatgcgccaaagcccagggcgatgaaactgaagcgacgcgctgtttacatctggcggcgaccggcgatcgcaccattaacatccacagctattacaacgatcagccggttgattacctcttctggcaaggaatggcgctgcgattactgggcgaacaacacaccgcacagcaactgtttagtgaaatgaaacagtgggcgcaagagatggcgaaaaccagtatcgaagcggatttctttgccgtctcgcagcctgacttgttgtcgctgtatggcgatttacaacagcagcataaagaaaaatgcctgatggtggcgatgctggcggccgcgggattaggcgagattgcgcaatacgaatctgctcgcgctgaattgacggcgattaatccggcctggccgaaagcggcattattcaccaccgtgatgccttttatttttaactacgttcactaa

SEQ ID NO: 95 - DNA, 729 bp, Escherichia coli
atggaaggctggcagcgcgcatttgtcctgcatagtcgcccgtggagcgaaaccagcctgatgctggacgtcttcacggaggaatcgggtcgcgtgcgtctggttgccaaaggcgcacgctctaaacgctctaccctgaaaggtgcattacagcctttcacccctctcttgctacgttttggcgggcgtggcgaagtcaaaacgctgcgcagtgctgaagctgtctcgctggcgctgccattaagcggtatcacgctttacagcggtctgtacatcaacgaacttctctcccgcgtactggaatacgagacgcgcttctctgaactctttttcgattacttgcactgcattcagtctcttgcaggggtcactggtacgccagaacccgcgctgcgccgctttgaactggcactgctcgggcatctgggttatggcgtcaattttacccattgtgcgggtagcggcgagccggtagatgacaccatgacgtatcgttatcgcgaagaaaaagggtttatcgcaagcgtcgttatcgacaataaaacgttcaccggaaggcagttaaaagcgttaaacgcacgggaatttcctgacgcagacacactgcgcgccgcgaaacgctttacccgcatggcgcttaagccgtatcttggcggtaaacctttaaagagcagggaactgttccggcaatttatgcctaagcgaacggtgaaaacacattatgaatga

SEQ ID NO: 96 - DNA, 4716 bp, Escherichia coli
gtgaacacaatacacttgcgctgtctcttcaggatgaatcccctggtctggtgcctgtgggctgatgttgcagcaaagctaaggtcgcttaaacgctactcagtattcacttttcagaggatgaaatttatgaacaggaccagtccctattattgtcgtcgctcagtactttccttattgatatctgccttgatatatgccccgcccgggatggctgccttcactcctgatgttattggtgtggtaaacgatgagactgtagatggcagccaacgagtagatgaacgaggtacaacaaataacactcatattatcaaccatggccagcagaatgtttatggcggggtatctaatggaagtcttattgaatctggtggatatcaagatgtaggaaggcataacaattatgtggggcagtctaataataccaccattaacgggggcagacagtcaattcatgacgggggtatttccacaggtacgataatcgagagtggcaatcaggacgtttataaagggggtatcagcaatggaacgacaattaagggcggtgcttcacgcgtagagggagggagtgcgaatggaacactcattgatggtggtagccagatagtaaaagttcaagggcatgctgatggtacaacgataaataagtctggctctcaggacgtagtacaaggaagtctggcaacgaacacaaccataaatggtggtcgacagtatgttgaacagagcacagtagaaacaaccaccatcaaaaatggcggtgagcaaagagtatatgagagccgtgcgctggacacgacgattgaaggcggaactcagtctctgaatagtaagtcaacggcaaaaaatactcagatctattctggtggtacgcaaattattgataacaccagctcctcggatgttattgaagtttattccggtggcgtgcttgatgttagtggtggtacggcaacaaatgttacccagcacgatggtgcaattttaaaaactaacactaacggtacgacggtgagcggtacgaatagtgaaggtgcattctccatccacaatcacgtggcagacaatgtgttgctggaaaacggtggtcatttagacataaacgcatatggttcggcaaacaagacgattattaaagataaaggaacaatgtcagttttaaccaatgctaaagctgatgcgacccgaatagataatggcggggttatggatgttgcaggaaacgcgacaaataccataattaatggtggcacacagaatattaataattatggcatagccacaggcaccaatatcaacagcggaacgcaaaatatcaaaagcggcgggaaagctgacacaacaattatatcctccgggagccggcaggttgttgagaaagatggtacggcaattggcagcaatattagcgccggaggctcgctgattgtctataccggcggtattgcacatggggttaaccaggagacgggcagtgctttagttgccaacacgggtgcagggactgatatcgaaggatacaacaagctctctcacttcactattaccggaggggaggctaattatgttgtgctggaaaataccggcgaactgacggtagtggctaaaacctcggcgaaaaatactaccattgatgctggcggtaagctgattgtccagaaggaggctaaaacagatagcaccagacttaataatggcggcgttctggaggttcaggacggtggtgaggctaagcatgttgagcaacaatccggcggcgcattaattgcttccacgacctccggaacacttatcgaaggaaccaacagttatggtgatgctttctacatcaggaattcagaagctaaaaatgtagtgctggaaaacgctggctcattaacagtcgtcactggttcccgggcagttgacacgattattaatgccaacggcaaaatggatgtttatggaaaagatgttggcactgtactcaatagtgctggcacccaaacaatatatgccagtgccacttctgataaagcaaatatcaaaggtggcaagcaaacggtatatggtttagccactgaagcaaatatcgaaagtggtgaacaaattgttgatggtgggtcaacagagaaaacacacatcaatggtggcacgcaaaccgttcagaattatggtaaggcgatcaataccgatatcgtctctggcctacaacaaattatggcaaacgggacagcggaaggttccattattaatggcggttcacagatagttaatgagggcggtctggctgaaaactcggtgcttaatgatggcggcacactcgatgtgcgggagaaaggcagcgcaacggggatacagcagagtagccagggcgcgttggttgcaaccaccagggcgacgcgggtcacaggaacacgcgcggatggcgtcgcgttcagcatcgagcagggtgcggcgaacaatatcctgctggcaaatggcggagtgttaaccgtggagtcagacacctcttctgacaaaacacaggtcaatacgggcggacgggagatcgtcaaaacaaaagccactgcgacaggcacgacgctcaccggcggtgaacaaattgtcgagggtgtggcgaatgagacaacaattaacgacggcggaatacaaacagtttcagctaacggagaggcaataaaaacaacgatcaatgaaggcggtacgctgacagtcaacgataatggcaaagcgacagatatcgtccagaacagcggtgccgctctccagacgagcacggctaacggtattgaaatcagcggtactcaccagtacggcactttttccatttccggcaatttagcgaccaatatgttgctggaaaatggcggtaatttattggtattagcaggtaccgaagctcgcgactccacggttggcaaggggggggcaatgcaaaaccagggtcaggactccgccacaaaggttaactctggtgggcaatatacccttgggcggtcaaaagatgagtttcaggctctggcccgggcagaagatctccaggttgctggcgggacagcaatcgtctacgcaggtacgctggcggatgcatcggtcagtggcgcgacaggaagcctgtcgttaatgacgccacgggataatgttacgccagttaaactcgaaggggcgatccggattaccgatagcgcgacattaactatcggcaatggcgttgatacgacgcttgccgacctgacggctgccagccggggcagtgtctggcttaacagcaataattcctgtgcaggcaccagcaactgcgagtatagagtaaacagtttgctacttaacgacggtaatgtttatttatcagcacaaacagcagcgcctgccacaactaacggtatatacaatacgctgacaaccaatgaactttccggtagcggtaatttctacctgcataccaacgttgcaggctctcggggcgatcaactggtcgtcaacaacaacgccactggtaattttaaaatctttgttcaggataccggcgtcagtcctcagtctgacgacgcgatgacgctggtgaaaacagggggaggggatgcttcgttttcgctgggcaatactggcggtttcgttgatcttgggacctatgagtatgtcctgaaaagcgatggcaacagcaactggaacctgaccaatgatgtcaaacccaacccggatcccaacccaaatcccaacccaaatccgaagccggatccaaaaccagacccaaaaccggatccgaaaccagacccgactcccgagccaacgccgacacccgttccggagaaacgcatcacgccttctaccgcagccgtactcaatatggcagcaacattaccgttggtatttgatgctgagctaaacagtattcgcgagcggttgaacataatgaaagcgagtccacacaacaataatgtctggggggcgacgtataacacccgtaataatgtcaccaccgatgcgggggccgggtttgagcagacgctgaccggaatgacagtggggatcgacagccctaatgatattcctgaggggattgcgacgctgggcgcttttatgggttattcccattcacatatcggttttgatcgcggaggacatggcagtgtgggcagttattctctgggcggctatgccagttgggaacatgaaagtggtttctatctggacggtgtcgtgaagctgaaccgttttgaaagtaacgtagccggtaaaatgagcagcggtggagccgccaatggcagttaccacagcaacgggctgggcggtcacattgaaaccgggatgcgatttaccgatggtaactggaacctgacgccgtatgcatcgttaacggggttcaccgctgataaccccgaatatcatttatccaatggcatggaatcgaaatcagtcgatacccgcagtatatatcgtgaactgggcgcaacgctgagttacaacatgcgtctggggaacggtatggaaattgagccgtggctgaaggcggctgtgcgcaaagaatttgtcgatgataaccgggtgaaggtgaataatgacggtaatttcgtcaatgatttgtcgggcagacgtggaatataccaggcaggtattaaagcctcattcagcagtacgttaagcgggcatcttggggtggggtatagccatggtgccggtgtggaatccccgtggaacgcggtagctggtgtgaactggtcgttctga

SEQ ID NO: 97 - DNA, 627 bp, Escherichia coli
atggtaagcagacgcgtacaagcacttctggatcaattacgtgcgcaaggtattcaggatgagcaggtgctgaatgcacttgccgccgtgccgcgtgaaaaattcgttgatgaagcgtttgaacaaaaagcctgggacaatatcgccttgccgataggtcaggggcagacgatttcgcagccgtatatggtggcgcgaatgaccgaattactcgagctgacgccgcagtcgcgggtgctggaaattggcaccggttcgggatatcaaacggcaatcctggcgcatcttgtccagcatgtttgctcggttgaacggattaaaggcttgcagtggcaggcgcgtcgccgcctgaaaaatcttgatttacataatgtttcaacccgtcatggcgatggatggcaaggttggcaggcacgtgcgccgtttgacgctatcattgttacggcggcaccgccggaaattccaactgcgctaatgacgcagctggacgaaggcgggattctcgtcttacccgtaggggaggagcaccagtatttgaaacgggtgcgtcgtcggggaggcgaatttattatcgataccgtggaggccgtgcgctttgtccctttagtgaagggtgagctggcttaa

SEQ ID NO: 98 - DNA, 1059 bp, Escherichia coli
atgctgtgcatatttgacagcaactcccccgtgatggcagatgtgcaggaagaaggcaagccgcagctgtggaaccataaacaaaatgatgcgttaggtctttatcttgatctccttatacaagcaatcaatactggtactattaacgctgaagattggcaaaaaggtgaccgactaaaatcggttgcgctgctgattgcttatctggataaagccaatttctatgttatggaagattccggagcgtgggaggaagatgcccgattaaacacatcttccgttgcactggtgacctctggactggaacgtttgtcaaacctactctcgaagaaagactctgtttttgtctctgatttactacgcgaagctaaagtcaatgaactggatgaaactctttcaacaacgaggttgaaccacctcatagataaaggttatgaaagaataacgttacagcttgatttagggggagaatccccaggttatctggaaaaagataaacattacagagaagccgatgcggctttacttaatgttatttatcctgcaaatctttcaaagataaacaccagaagaaaagagcaagttctaaaaatagttaaaaaactagcaggtccgtatggtataaaaagatacgagaaggataattatcagtcggcaaatttttggttcaatgatattaaaaccgataccgatcaaaattcgcatgcaaaaagagaaaagagcttcattccatcaacagaagcagaatggttttttgactcatggtatgcaaaatcagcagcaattgtttataaagaatcaagaaaagaagagtatttgaatgactcagtacaatttatgaatagatcattggcccaaataacaggcgagaatatgattggtgcaaatggcaggagcgtaccagaaatggcacttcccgaaagctataactatatccacaagtcgggaactttgcatgaagcgccaagccctatcattccgctaaattggtcgaaagcttcaatgactctcatgttgaaagagatgtccaaccttatcaatgatgagggaattaaataa

SEQ ID NO: 99 - DNA, 1212 bp, Escherichia coli
atggctaagaatattccattcaaactgattcttgaaaaagcaaaagattaccaggcggatatgactcgcttcctgcgcgacatggttgctattcccagtgaaagctgcgacgagaaacgggtagtacatcgtattaaagaagagatggaaaaagtcggcttcgataaagttgaaatcgacccgatgggtaacgttctcggttatatcggccacggcccgcgtctggtggcaatggacgctcatatcgataccgtcggcattggcaacatcaaaaactgggacttcgatccgtacgaaggcatggaaactgatgagctgatcggtggtcgcggtacttccgaccaggaaggcggcatggcatctatggtttatgccggtaaaatcattaaagacctcggtctggaagatgaatataccctgctggttaccggtactgtgcaggaagaagactgcgacggtctgtgctggcagtacattattgaacaatccggcattcgcccggaatttgtggtcagtaccgaaccaaccgactgccaggtataccgtggtcagcgcggtcgtatggaaattcgtattgatgttcagggtgttagctgccacggttctgcgccagaacgcggtgacaacgccattttcaaaatgggtccgattcttggcgaattacaagaactctcccaacgtctgggttatgacgaattcctcggcaaaggcaccctcaccgtttctgaaatcttcttcacatccccaagccgttgcgctgtagcagatagctgcgccgtctctattgaccgccgtctgacctggggcgaaacctgggaaggcgcgctggacgaaatccgcgccctgcctgcagtacagaaagctaacgcggttgtttctatgtacaactacgaccgtccgtcctggactggcctggtttacccaaccgaatgctacttcccgacctggaaagtggaagaagatcacttcaccgttaaagcactggtgaatgcctacgaagggctgtttggcaaagcgccggttgttgataagtggaccttctcaactaacggcgtatctatcatgggccgtcacggcattccggtgatcggctttggcccgggtaaagaacctgaagcgcatgcacctaacgaaaaaacctggaaatctcacctggtgacctgtgccgcgatgtacgctgcaatcccgttaagctggctggcaaccgaataa

SEQ ID NO: 100 - DNA, 885 bp, Escherichia coli
atgctcgcatgttgcgcaatctactcgcccgtccgctgcgcttttccttatactgagactgagcgtcggttcacctgcaaacggcgcatttttagaataatcctgaccttgtgcggaagaaaaaacatgaaaattcgcgccttattggtagcaatgagcgtggcaacggtactgaccggttgccagaatatggactccaacggactgctctcatcaggagcggaagcttttcaggcttacagtttgagtgatgcgcaggtgaaaaccctgagcgatcaggcatgtcaggagatggacagcaaggcgacgattgcgccagccaatagcgaatacgctaaacgtctgacaactattgccaatgcgctaggcaacaatatcaacggtcagccggtaaattacaaagtgtatatggcgaaggatgtgaacgcctttgcaatggctaacggctgtatccgtgtctatagcgggctgatggatatgatgacggataacgaagtcgaagcggtgatcggtcacgaaatggggcacgtggcattaggccatgtgaaaaaaggaatgcaggtggcacttggtacaaatgccgtacgagtagctgcggcctcggcgggcgggattgtcggcagtttatctcaatcacaactcggtgatctgggcgagaaattagttaattcgcaattctcccagcgccaggaagcagaagccgatgattattcttacgatcttctgcgccaacgcggcatcagcccggcaggtcttgccaccagctttgaaaaactggcaaaactggaagaaggtcgccaaagctcaatgtttgacgaccatcctgcatccgccgaacgcgcccagcatattcgcgatcgcatgagcgcggatgggattaagtaa

SEQ ID NO: 101 - DNA, 708 bp, Escherichia coli
atgtaccgttatttgtctattgctgcggtggtactgagcgcagcattttccggcccggcgttggccgaaggtatcaatagtttttctcaggcgaaagccgcggcggtaaaagtccacgctgacgcgcccggtacgttttattgcggatgtaaaattaactggcagggcaaaaaaggcgttgtcgatctgcaatcgtgcggctatcaggtgcgcaaaaatgaaaaccgcgccagccgcgtagagtgggaacacgtcgttcccgcctggcaattcggtcaccagcgccagtgctggcaggacggtggacgtaaaaattgcgccaaagatccggtctatcgcaagatggaaagcgatatgcataacctgcaaccgtcagtcggcgaggtgaatggcgatcgcggcaactttatgtacagccagtggaatggcggtgaaggccagtacggtcaatgcgccatgaaggtcgatttcaaagaaaaagctgccgaaccaccagcgcgtgcacgcggtgccattgcgcgcacctacttctatatgcgtgaccattacaacctgacactctctcgccagcaaacgcagctgttcaacgcatgggacaagatgtatccggttaccgactgggagtgcgagcgcgatgaacgcatcgcgaaggtacagggcaatcataacccgtatgtgcaacgcgcttgccaggcgcgaaagagctaa

SEQ ID NO: 102 - DNA, 636 bp, Escherichia coli
gtgacagcgcccttctttccacgcatactgggcgctgttgcttttttgaaccaggaaacagaacctctgacaatgaatttacagcatcactttcttattgccatgcctgctctccaggatccgattttccgtcgttccgtggtctacatttgcgaacataataccaatggtgcaatggggatcatcgtcaacaagccgctggaaaatctcaaaattgaagggattctggaaaagctgaagatcacgccggagccgcgtgatgaatcaatccgtctggataaaccggttatgctcggcggcccactggctgaagatcgcgggtttattttgcatactccgccctccaattttgcttccagcattcgcatttcagacaacacagtgatgaccacttcccgcgatgtgctggaaacgctcggcaccgataaacaaccgtctgacgtattggtggctctgggctatgcctcctgggaaaaaggtcaactggaacaagaaattctcgataacgcgtggctaaccgccccggcagatctgaatattctgttcaaaacgccaattgccgaccgctggcgcgaggcggcaaaactgattggtgtggatattctcaccatgcctggtgtggcaggacacgcctga

SEQ ID NO: 103 - DNA, 1026 bp, Escherichia coli
gtgccaggttatgcgcaatatcgttcattttccgaggatcttagtatgaatatggaagaaattgtggcccttagtgtaaagcataacgtctcggatctacacctgtgcagcgcctggcccgcacgatggcgcattcgcgggctaatggaagctgcgccgtttgatgcgccggacgtcgaagagctactgcgggagtggctggatgacgatcagcgggcaatattgctggagaatggtcagctggattttgccgtgtcgctgacggaaaaccagcgattgcgtggcagcgcattcgcgcaacggcatggcatttcgctggcgttacggctgttaccttcgcactgcccgcagctcgaacagcttggcacaccaccgatattgccggagttactcaagagcgagaatggcttgattctggtgacgggggcgacggggagtggcaaatctaccacgctggcggcgatggttggttatctcaatcaacatgctgatgcgcatattctgacgctggaagatcctgtggaatatctctatgccagccagcgatgtttgatccagcagcgggaaatcggtttgcattgtatgacgttcgcatcgggattgcgggccgcattgcgggaagatcctgatgtgattttgctcggagagctgcgtgacagcgagacaatccgtctggcgctgacggcggcagaaaccgggcatctggtgctggcaaccttacatacacgtggtgccgcgcaggcagttgagcgacttgtggattcatttccggcgcaggaaaaagaccccgtgcgtaatcaactggcaggtagtttacgggcagtgctgtcacaaaagctggaagtggataaacaggaaggacgcgtggcgctatttgaattgctgattaacacacccgcggtggggaatttgattcgcgaagggaaaacccaccagttaccgcatgttattcaaactgggcaacaggtggggatgataacgtttcagcagagttatcagcagcgggtgggggaagggcgtttgtga

SEQ ID NO: 104 - DNA, 1008 bp, Escherichia coli
gtgaaaaagcaatggattgttggcacggcgctgcttatgttgatgactggtaatgtctgggcagatggcgaaccgccaactgaaaatatcttaaaagatcaattcaaaaagcagtatcacggcattctcaagcttgatgccatcaccttaaaaaatcttgatgctaagggtaatcaggccacctggtcagcggaaggcgatgtctcttccagtgacgatctctatacctgggtcggtcagttggcagattacgaactgctcgaacagacctggacgaaagataaaccggtaaaattctcggcgatgttaaccagtaaaggaacgcccgcgtctggctggacggtgaacttttactcttttcaggcgacagctagcgatcgtggtcgggtggtcgacgatatcaaaacgaataataaatatctgatcgtgaatagcgaagatttcaattatcgctttagtcagcttgagactgcgttgaatacccagaagaactcgattcctgcgctggaaaaggaagtgaaagcgcttgataagcaaatggtggcggcgcagaaagcagcggatgcatattggggaaaagatgcaaatggtaagcaaatgacccgcgaagatgcctttaaaaaaattcaccaacagcgtgatgagtttaataaacagaacgatagcgaggcgttcgcggttaaatatgacaaagaggtttatcaaccggcgattgcggcatgtcataaacagagtgaagagtgttatgaagtgccgattcagcagaaacgagatttcgatatcaacgaacaacggcgacagacttttctgcaatcacaaaaacttagccgtaaattgcaggatgactggataacgctcgaaaaagggcaatatccgttaacgatgaaagtttcagaaataaacagtaaaaaagtcgcgattttgatgaaaattgacgatatcaaccaggctaatgaacgctggaaaaaagataccgaacaactgcggcgcaatggggtgattaagtaa

SEQ ID NO: 105 - DNA, 720 bp, Escherichia coli
atgaaaaacgacgtcatttcaccggaatttgatgaaaacggccgcccactgcgccgtatccgtagttttgtgcgccgccaggggcgactgaccaaaggccaggaacatgcgctggaaaactactggccggtgatgggcgttgagttcagcgaagatatgctggatttccccgcgctttttggccgtgaagcgccggtgacgcttgagattggttttggcatgggggcgtcgctggtggcaatggctaaagatcgccccgagcaggacttcctcggcattgaagtgcattcaccgggcgttggtgcgtgcctggcttctgcgcatgaagagggcttaagcaacctgcgcgtgatgtgtcacgatgcggttgaagtgctgcataaaatgattcctgacaattcattgcgcatggtgcagctctttttccctgacccgtggcacaaagcgcgccataataaacgccgtatcgttcaggtgccgtttgccgaactggtaaaaagcaaactgcagctggggggcgtattccatatggcgaccgactgggaaccttatgcggaacatatgattgaagtgatgtcttctattgacggttataaaaacctgtcagagagcaatgattacgtaccgcgtccggcatcacgtccggtgacgaaatttgaacaacgtggtcatcgtcttggtcacggagtatgggacttaatgttcgagagggtgaaataa

SEQ ID NO: 106 - DNA, 1266 bp, Escherichia coli
atggcactgactgacgcaaaaatccgggctgcaaagcccactgacaaggcttataaactcactgacggggctggcatgttcctgctggtacatcctaatggttcccgttactggcgtctccgttatcgtattctgggtaaagagaagactctggcacttgttgtgtatccagaagtatctctctccgaagctcgtacaaaacgggatgaggcccgaaaactgatttcggagggggttgacccttgcgaacagaaaagagctaaaaaagtagtccctgatttacaactctctttcgaacatattgcacgacgctggcatgccagtaataaacaatgggcacaatcacacagcgataaagtactcaaaagcctcgagacacacgtattcccctttatcggcaatcgggatatcacaacactcaataccccggacctgcttatccctgttcgtgctgcagaagctaaacaaatttatgaaatcgccagtcgtctgcagcaaagaatatctgccgtaatgcgttatgccgtacagtctggcatcatcagatataatcctgctctggatatggctggcgcattgactacggtaaaacgccagcatcgccccgctcttgatctttctcgcctgcctgaacttttgtcgcgtattggcagttacaaggggcaacctgtcacccagcttgccgttatgctgaatttactggtttttattcgttccagtgaactcagatacgcccgctggtctgaaattgatattgacaatgccatgtggactattccagccgaacgcgaacctctgccaggcgtaaaattctcacaccggggatccaagatgcgaacaccacatcttgtgccactcagcaaacaggttgtagccatactggcagaacttcagacatgggctggtgaaaatggtctgatctttacgggagcacatgacccacgtaaaccaatcagtgaaaacaccgtaaataaagccctgagggttatggggtatgacacaacccaggatgtctgtggtcatggattccgggcgatggcatgtagtgcgttaatagaatcaggtttgtggtcccgcgatgcagttgaacgtcagatgagccatcaggaacgtaacggtgtacgtgctgcttacattcataaagcagaacatctggaagaacggcgactgatgctacagtggtgggccgattttctggatgcaaacagagaaagatttatcagtccatttgaatatgcaaagattaataatccattaaaacagtaa

SEQ ID NO: 107 - DNA, 1488 bp, Escherichia coli
atgcaaatgaagaaattgctccccattcttatcggcctgagcctttctgggttcagttcgttgagccaggccgagaacctgatgcaagtttatcagcaagcacgccttagtaacccggaattgcgtaagtctgccgccgatcgtgatgctgcctttgaaaaaattaatgaagcgcgcagtccattactgccacagctaggtttaggtgcagattacacctatagcaacggctaccgcgacgcgaacggcatcaactctaacgcgaccagtgcgtccctgcagttaactcaatccatttttgatatgtcgaaatggcgtgcgttaacgctgcaggaaaaagcagcagggattcaggacgtcacgtatcagaccgatcagcaaaccttgatcctcaacaccgcgaccgcttatttcaacgtgttgaatgctattgacgttctttcctatacacaggcgcaaaaagaagcgatctaccgtcaattagatcaaaccacccaacgttttaacgtgggcctggtagcgatcaccgacgtgcagaacgcccgcgcgcagtacgataccgtgctggcgaacgaagtgaccgcacgtaataaccttgataacgcggtagagcagctgcgccagatcaccggtaactactatccggaactggcggcgctgaatgtcgaaaactttaaaaccgacaaaccacagccggttaacgcgctgctgaaagaagccgaaaaacgcaacctgtcgctgttacaggcacgcttgagccaggacctggcgcgcgagcaaattcgccaggcgcaggatggtcacttaccgactctggatttaacggcttctagcgggatttctgacacctcttatagcggttcgaaaacccgtggtgccgctggtacccagtatgacgatagcaatatgggccagaacaaagttggcctgagcttctcgctgccgatttatcagggcggaatggttaactcgcaggtgaaacaggcacagtacaactttgttggtgccagcgagcaactggaaagcgcgcatcgtagcgtcgtgcagaccgtacgttcctctttcaacaacattaatgcttctatcagtagtattaacgcctacaaacaagccgtagtttccgctcaaagctcattagacgcgatggaagcgggctactcggtcggtacgcgtaccattgttgatgtgttggatgcgaccaccacgctgtacaacgccaagcaagagctggcgaatgcgcgttataactacctgattaatcagctgaatattaagtcagccctgggtacgttgaacgagcaggatctgctggcactgaacaatgcgctgagcaaaccggtttccactaatccggaaaacgttgccccgcaaacgccggaacagaatgctattgctgatggttatgcgcctgatagcccggcacccgtcgttcagcaaacatccgcacgcactaccaccagtaacggtcataaccctttccgtaactga

SEQ ID NO: 108 - DNA, 1302 bp, Escherichia coli
atggctcaggaaatcgaattaaagtttattgttaatcacagcgccgttgaggcgttgcgtgaccatctcaatacgctgggcggcgagcaccatgaccccgtgcagttactgaatatttactacgaaacgccggataactggctgcgtgggcacgatatgggcttacgtattcgtggcgaaaacggtcgctatgagatgaccatgaaagttgcaggaagagtgacaggcggcttacaccagcgcccggaatataacgtggcgttgagcgaaccgacgctcgacctggcgcagttaccgacggaagtctggccgaacggcgaattgcccgccgatctcgcttcccgcgtacaaccgctgttcagcaccgatttttatcgcgaaaaatggctggtggcggtcgatggcagccgaattgaaatcgctctcgatcagggtgaggtgaaagcgggggaatttgctgaacctatctgtgagctggaactggagctgcttagcggcgacacgcgcgcggtgctgaaactggcgaaccaactggtatcgcaaaccggattacgccagggcagcctgagcaaagcggcgcgtggctatcatctggcgcagggcaatccggcgcgtgaaatcaaaccgaccaccattttgcatgttgcggcaaaagccgatgtggaacaggggctggaagcggcgctcgagctggcgttagcgcaatggcagtatcatgaagaactgtgggtacgcggcaacgatgcggcgaaagaacaggtgctggcagccattagcttggtccgtcatacgctgatgctgttcggtggtattgtgccgcgtaaagcgagcactcacttacgtgatttgctgacccaatgcgaagcgaccattgcttctgcggtttctgccgtgacggcggtctactctaccgaaacggcaatggcgaagctggcgttgaccgaatggttggtaagcaaagcatggcagccatttttagatgccaaagcgcagggcaaaatcagcgactccttcaaacgctttgccgatatccatctttcccgccatgccgctgaactgaaaagcgttttctgccagccgttaggcgatcgctaccgtgaccagttgccacgcctgacgcgtgatattgactcaatactgttgctggcgggttactatgatcctgtcgtcgcgcaagcctggctggagaactggcaggggctgcatcacgctattgcgaccgggcaacgcatcgaaattgaacatttccgtaatgaggcaaacaatcaggaaccgttctggttgcacagcggaaaacgttaa

SEQ ID NO: 109 - DNA, 507 bp, Escherichia coli
atggttgaggatattttggctccagggttacgggtcgtgttttgcggtatcaaccctgggctttcatccgccgggactggttttccctttgctcatccggcaaatcgcttctggaaggtgatatatcaggccgggtttaccgaccatcagttgaagccgcaggaggcacagcatctgctggattatcgttgtggcgtcaccaaactggtagacaggccaacggtgcaagccaatgaaatttcaaagcaagagctacacgcaggtgggcgtaagctgattgaaaaaattgaagattatcagccgcaagcgttggcgattctgggcaaacaagcatatgaacagggattcagccagcgtggtgcacagtgggggaaacaaacgctcagcattggttcgacgcagatttgggtgctgccaaatcccagcggtttaagtcgcgtttcactggagaaactggttgaagcgtatcgcgagctggaccaggcgctggtggtgcgtgggcgataa

SEQ ID NO: 110 - DNA, 504 bp, Escherichia coli
atgctaattcgagtagaaattcccattgatgcgccgggtattgatgccctgctgcgtcgttcattcgaaagtgatgcggaagcgaagctggttcacgatctgcgtgaagatggctttctgacgctggggctggtggcgacagatgacgaaggtcaggtcattggctatgtggcatttagtccggttgatgtgcagggcgaagacctgcaatgggtcggcatggcaccgctggcggtagatgaaaaataccgtggacaggggctggcacgccaactggtctatgaaggactcgattcgcttaatgagttcggctatgccgcagtggtgacgctgggcgatccggcgctatacagccgtttcggctttgaactggcggcgcatcacgatctgcgttgccgctggccgggcactgaaagcgccttccaggtacatcgtttagcggatgacgcgttgaatggcgtaactggtctggttgagtatcacgagcatttcaatcgcttttaa

SEQ ID NO: 111 - DNA, 1008 bp, Escherichia coli
atgactgataaaaccattgcgttttcgctactcgatctggcccccattcccgaaggttcttcagcgcgagatgcattctcccactctctcgatctcgcccgtctggctgaaaagcgcggctatcatcgctactggctggcagaacaccacaatatgactggcattgccagtgctgccacgtcggtattgattggctatctggcggcgaataccaccacgctgcatctggggtctggcggcgtgatgttgcctaaccactcaccgttggtcattgcagaacagttcggcacgctcaatacactctatccggggcgaatcgatttggggctgggtcgtgctccgggtagtgaccagcgaaccatgatggcgctacgtcgtcatatgagcggggatattgataatttcccccgcgatgtcgcggagctggtggcctggtttgacgcccgcgatcccaatccgcatgtgcgcccggtaccaggctacggcgagcaaatccccgtgtggttgttaggctccagcctttacagcgcgcaactggcggcgcagcttggtctgccgtttgcgtttgcctcacacttcgcgccggatatgttgttccaggcgctgcatctttatcgcagcaacttcaaaccgtcggcacgactggaaaaaccatacgcgatggtgtgcatcaatattatcgctgccgacagcaaccgcgacgctgaatttctgtttacctcaatgcagcaagcctttgtgaagctgcgccgtggcgaaaccgggcaactgccgccgccgattcaaaatatggatcagttctggtcaccgtctgagcagtatggcgtgcaacaggcgctgagtatgtcgctggtgggcgataaagcgaaagcgcgtcatggtttgcagtcgatcctgcgcgaaaccgacgccgatgagattatggttaacgggcagattttcgaccaccaggcgcgcctgcattcgtttgagctggcgatggatgttaaggaagagttgttgggatag

SEQ ID NO: 112 - DNA, 2673 bp, Escherichia coli
atgacagatgtaacgattaaaacgctggccgcagagcgacagacctccgtggaacgcctggtacagcaatttgctgatgcaggtatccggaagtctgctgacgactctgtgtctgcacaagagaaacagactttgattgaccacctgaatcagaaaaattcaggcccggacaaattgacgctgcaacgtaaaacacgcagcacccttaacattcctggtaccggtggaaaaagcaaatcggtacaaatcgaagtccgcaagaaacgcacctttgtgaaacgcgatccgcaagaggctgaacgccttgcagcggaagagcaagcgcagcgtgaagcggaagagcaagcccgtcgtgaggcagaagaatcggctaaacgcgaggcgcaacaaaaagctgaacgtgaggccgcagaacaagctaagcgtgaagctgctgaacaagcgaaacgtgaagctgcggaaaaagacaaagtgagcaatcaacaagacgatatgactaaaaacgcccaggctgaaaaagcccgccgtgagcaggaagctgcagagctcaagcgtaaagccgaagaagaagcgcgtcgtaaactcgaagaagaagcacgtcgcgttgctgaagaagcacgtcgtatggcggaagaaaacaaatggactgataacgcggaaccgactgaggattccagcgattatcacgtcactacttctcaacatgctcgccaggcagaagacgaaagcgatcgtgaagtcgaaggcggccgtggccgtggtcgtaacgcgaaagcagcgcgtccgaagaaaggcaacaaacacgctgaatcaaaagctgatcgtgaagaagcacgcgcagcagtacgtggcggtaagggcggaaaacgtaaaggttcttcgctgcagcaaggcttccagaagcctgctcaggccgttaaccgtgacgttgtgatcggcgaaactatcaccgttggcgaactggcgaacaagatggcggttaaaggctctcaggtcatcaaagcgatgatgaaactgggcgcaatggcaaccatcaaccaggttatcgatcaggaaaccgcacagctggttgctgaagagatgggccacaaagttatcctgcgtcgtgaaaacgagctggaagaggcggtaatgagcgaccgtgacacgggagctgcggctgaaccgcgcgctccggttgtgaccatcatgggtcacgttgaccacggtaaaacctctctgctggactacattcgttcaacgaaagtggcctctggcgaagcgggcggcattacccagcacattggtgcataccacgttgaaactgaaaacggcatgatcaccttcctggacaccccggggcacgccgcgtttacttcaatgcgtgcacgtggtgcgcaggcaactgacatcgtagtcctggttgttgctgccgacgacggcgtaatgccgcagaccatcgaagcaatccagcacgcgaaagcggcgcaggtaccggtggtggttgcagtgaacaagatcgataaaccagaagccgatccggatcgcgttaagaacgaactctcccagtacggcatcctgccggaagagtggggcggtgaaagccagttcgtacacgtatctgcgaaagcgggtaccggtatcgatgaactgctggacgctatcctgctgcaggcggaagttctggagctgaaagcggtacgtaaaggtatggcgagcggtgcggttatcgaatccttcctcgataaaggtcgtggtccggttgctaccgttctggtacgtgaaggtactctgcacaagggcgatatcgttctgtgtggcttcgaatacggtcgtgttcgtgcgatgcgtaacgaactgggtcaggaagtgctggaagcgggtccgtccattccggtggaaatcctcggcttgtccggtgttccggctgcgggtgatgaagttaccgttgtacgtgacgagaagaaagcgcgtgaagttgcactctatcgtcagggtaaattccgcgaagttaaactggcgcgtcagcagaaatctaaactcgagaacatgttcgccaacatgaccgaaggcgaagttcacgaagtgaatatcgtcctgaaggcagacgtacagggttctgtcgaagcgatctccgactccttgctgaaactgtctactgacgaagttaaagtgaagatcatcggttctggcgtaggtggtatcaccgaaaccgacgccaccttggctgcggcgtccaacgccatcctggttggcttcaacgtacgtgctgatgcctctgcacgtaaagtgattgaagcggaaagcctggatctgcgttactactccgtcatctataacctgatcgacgaagtgaaagcggcgatgagcggtatgctgtctccggaactgaaacagcagattatcggtctggcggaagttcgtgacgtgttcaaatcgccgaaatttggtgccatcgcaggctgtatggttaccgaaggtgtggttaaacgtcacaacccgatccgcgttctgcgtgacaacgtggttatctatgaaggcgagctggagtccctgcgccgcttcaaagatgacgttaacgaagtccgtaacggtatggaatgtggtatcggcgttaagaactacaacgacgtccgcactggcgatgtgatcgaagtattcgaaatcatcgagatccaacgtaccatcgcttaa

SEQ ID NO: 113 - DNA, 459 bp, Escherichia coli
gtgggcttgtccacattagagcaaaaattaacagagatgattactgcgccagttgaggccctgggttttgaactggttggcatcgaatttattcgcggtcgcacatccacactgcgcatctatattgatagtgaagatggcatcaatgttgatgattgtgctgatgtgagccaccaggtaagtgctgtgctggatgttgaagatcccatcaccgttgcttataacctggaagtctcctcaccgggtctcgatcgcccactgttcacggctgaacactacgcccgttttgtcggagaagaggtgactctggttctccgtatggcggtacaaaaccgtcgtaaatggcagggcgttatcaaagcggtagacggtgaaatgatcacagttaccgtcgaaggtaaagatgaagtgttcgcgctgagtaatatccagaaggcgaacttggttccccacttttaa

SEQ ID NO: 114 - DNA, 1434 bp, Escherichia coli
atgcgattttccagatttatcatcggattgaccagctgtatagcgttcagtgttcaggccgcaaatgttgatgagtacattactcaactccccgctggtgccaaccttgccctgatggtgcaaaaagtcggcgcgtcggcccccgctattgattaccacagtcagcagatggcgctgcccgccagtacccagaaagtgattactgcgctggcggcgttgattcaactcggccccgattttcgtttcaccacgacgcttgaaaccaaaggcaatgtggaaaacggcgtacttaagggtgacttagtggcgcgatttggtgccgatccgacgttaaaacgtcaagatattcgcaatatggtcgcgactttgaaaaaatctggcgtcaaccaaatcgatggcaatgtgttgatagatacctccattttcgccagccacgataaagcccccggctggccatggaatgacatgacacaatgctttagcgctccgcctgccgtcgccatagttgaccgcaactgtttctccgtctcgctctacagtgccccaaaacctggtgatatggcttttatacgcgtggcatcttattaccccgttacgatgttcagccaggtacgcaccctcccccgtggttctgccgaagcgcaatactgcgaactggatgtggtgccaggcgacctgaaccgctttacgctgacgggatgcctgccacaacgttctgagccgctcccgttggcttttgccgtgcaggatggagccagctatgccggtgcaattctgaaagatgagttaaaacaggcgggtatcacctggagcggaacactgctgcgccagactcaggttaacgaacctggaacggtagttgccagtaaacagtcggccccgctgcacgatctgcttaagattatgctgaaaaagtcggacaacatgatcgccgatacggttttccgcatgataggccatgcgcgcttcaatgtgcctggaacatggcgggccgggtcggacgctgtgcgtcagatcctgcgccagcaagccggtgtcgatattggaaacaccattattgccgatggttcagggctttcgcggcataacctgattgcccccgccaccatgatgcaggtgctgcaatacattgcccaacacgacaatgaacttaactttatctccatgctgccgctagcgggctatgacggctctttgcagtaccgtgcaggtctgcatcaggcgggcgtggatggaaaagtctcagcgaaaaccggttcgttgcagggggtatataacctggcgggattcattaccacagcgagcgggcaacgaatggcgtttgtacaatatctttctggctatgcagtagaaccggcggatcagcgtaatcgccgtattccgttagtgcgttttgaaagccgtttgtataaagatatttatcagaacaattag

SEQ ID NO: 115 - DNA, 558 bp, Escherichia coli
atgaaattcaaaacaaacaaactcagccttaatcttgtgcttgccagctcacttctggccgccagcattccggcatttgccgtaaccggagacactgatcagccgatacacattgaatcggaccagcaatctcttgatatgcaaggcaacgtggttacctttaccggtaatgtcatcgtcacccagggcaccataaaaattaatgccgacaaagtggtcgttacccgtccgggtggcgaacaaggtaaagaagtgattgacggctacggtaaaccggcaacgttctaccagatgcaggacaacggtaaacccgttgaaggtcacgcttcccagatgcactacgaactggcaaaagattttgtcgttctgacgggtaatgcttatctgcagcaggtcgatagcaacattaagggcgataagatcacttacctggtgaaagagcagaaaatgcaggctttcagcgacaaaggcaagcgtgtaaccaccgttctggtgccgtcgcagctgcaggacaaaaacaacaaaggccagaccccggcacagaagaagggtaattaa

SEQ ID NO: 116 - DNA, 855 bp, Escherichia coli
atggtactgatgatcgtcagcggacgttcaggttcaggtaaatctgtcgccctgcgtgcgctggaagatatgggtttttactgcgtggataaccttcccgtagtgttgttacccgatctggctcgaaccctggccgatcgcgagatttctgccgccgtcagcattgatgttcgtaatatgccggagtcaccagaaatattcgaacaggcgatgagtaacctgcctgacgctttctcaccgcaactactgttcctggatgccgaccgtaataccttaattcgtcgttacagtgacacgcgccgactgcatccgctttccagcaaaaacctgtcgctggaaagtgctatcgacaaagaaagcgatctgctggagcctctgcgttcgcgagcggatctgattgtcgatacctcagaaatgtccgttcacgagctggcagaaatgctgcgtacccgtctgctgggtaaacgtgaacgcgaactgacaatggtctttgagtctttcggcttcaaacacggtatccctatcgatgcagattacgtctttgacgtgcgcttcttgccgaacccgcactgggatccgaaactgcgtccaatgacaggtcttgataagcctgtcgccgcgttcctcgaccgccacacagaagtacacaattttatctaccagacgcgaagctatcttgagctatggttacctatgctggaaaccaacaaccgtagctacttgacggtcgccattggttgtaccggcgggaagcaccgttcggtgtatattgcagagcaactggcagactacttccgctcgcgcggtaaaaacgtccagtcacgccatcgtacgctggaaaaacgtaaaccatga

SEQ ID NO: 117 - DNA, 4554 bp, Escherichia coli
atgacacgcaaaccccgtcgccacgctctttctgtgcccgtgcgcagcggttcggaagtggggttcccgcagagcctgggggaggttcacgatatgttgtacgataaatcccttgagagggataactgtggtttcggcctgatcgcccacatagaaggcgaacctagccacaaggtagtgcgtactgcaatacacgcactggcccgcatgcagcaccgtggcgcgattctcgccgatggtaaaaccggtgacggttgcggcttgctgttacaaaaaccggatcgcttttttcgcatcgttgcgcaggagcgcggctggcgtttagcgaaaaactacgccgtcgggatgctcttcctgaataaagatcctgaactcgccgctgccgcacgccgcatcgttgaagaagagctgcaacgcgaaaccttgtcgattgtgggctggcgtgatgtccccactaacgaaggcgtgctgggtgaaatcgccctctcctctctgccacgcattgagcaaatttttgtgaacgccccggcaggctggcgtccgcgcgatatggagcgccgtctgtttatcgcccgccgccgcattgaaaagcgtctcgaagccgacaaagacttctacgtctgtagcctgtcgaatctggtgaacatctataaaggtctgtgtatgccggcggatctgccgcgcttttatctagatcttgcggacctgcgtctggaatcggccatttgcctgttccaccagcgcttctccactaacaccgtaccgcgctggccgctggcgcaaccgttccgctacctggcgcataacggtgaaatcaacaccatcaccggtaaccgccaatgggcgcgtgcgcgtacttataaattccagacaccgcttatccctgacctgcacgacgccgcaccgttcgtcaacgaaatcggctctgactccagttcgatggataacatgctggaactgctgctggcaggcgggatggatatcatccgcgccatgcgtctattagtaccacccgcctggcagaacaacccggatatggacccggaactgcgtgccttctttgactttaactccatgcatatggagccgtgggatggcccggcgggcatcgtgatgtctgacggtcgttttgctgcctgtaacctcgaccgtaacggtctgcgtccggcgcgctacgtcatcaccaaagataagctcatcacctgcgcctctgaagtcggtatctgggattaccagcctgacgaagtggtcgaaaaaggccgcgtcgggccaggcgaactgatggtaatcgacactcgcagtgggcgtattctgcactcggcagaaaccgatgacgatctgaaaagccgccacccttataaagagtggatggagaaaaacgtccgccgactggtaccgtttgaagatctgcccgatgaagaagtgggtagccgcgaactggacgacgacacgcttgccagctaccagaaacagtttaactacagcgcggaagagctggactccgtaattcgcgtactgggcgaaaacggtcaggaagcggtcggttcgatgggcgatgataccccattcgccgtgctctccagtcagccgcgcattatttacgactacttccgccagcagtttgcccaggtgactaacccgccaatcgacccgctgcgtgaagcgcatgttatgtcgctcgccaccagtatcggtcgtgaaatgaacgtcttttgcgaagcagagggccaggcgcaccgtttaagctttaaatcgccgattctgctctactccgatttcaaacagctcacgacgatgaaagaggagcactaccgcgcagatacgctggatatcacctttgacgtcaccaaaaccacgctcgaagcgacggtcaaagagctgtgcgacaaagccgaaaaaatggtacgtagcggcaccgtgctgctggtgctctccgaccggaatatcgctaaagatcgcctgccggttccggctccaatggcggttggcgcgatccagacccgtctggtcgatcaaagcctgcgttgcgatgccaacatcatcgtcgaaaccgccagcgcccgcgatccgcaccacttcgccgtgttgctgggtttcggcgcgacggctatttatccgtaccttgcctatgaaacgctgggccgcctggtagacacccacgcgattgccaaagattatcgtaccgtgatgctcaactaccgtaacggcatcaacaaaggcttgtacaaaatcatgtccaaaatgggcatctccaccatcgcctcttaccgctgctcgaaactgtttgaagcggtcggtctgcacaatgatgtagtgggcctgtgcttccagggggcggtcagccgcattgggggggcgagctttgaagacttccagcaggatctgctgaatctctcgaaacgagcctggctggcgcgcaagcccatcagccagggcggcctgctgaaatacgtccacggcggcgaataccacgcctacaacccggacgtggtgcgcacgctgcaacaggcggtacagagcggcgagtatagcgactatcaggaatacgcgaagctggttaatgagcgtccggcaaccacgctgcgcgatctgctggcaattacgccgggtgaaaacgcggtcaacattgccgatgttgaaccggcaagcgaactgtttaaacgcttcgataccgcggcgatgtctatcggcgcgttaagcccggaagcccacgaggcgctggcggaagcgatgaacagcatcggcggaaactcgaactccggtgaaggtggtgaagacccggcgcgctacggcaccaacaaagtgtcgcgcatcaagcaggtggcttccggtcgctttggggttactccggcgtatctggtcaatgccgacgtcattcagattaaagtcgcccagggcgcgaagccgggcgaaggcggtcagttgccgggcgacaaagtcactccttacattgccaaactgcgctattcggtgccgggcgtgacgctgatctccccgccgccgcaccacgatatctactctatcgaagacttagcgcagctcattttcgacctcaagcaggttaacccgaaagcgatgatctccgtgaagctggtttccgaaccgggcgttggcaccatcgccaccggtgtggcgaaagcttatgccgatttaatcaccatcgcaggctatgacggcggcaccggcgcaagtccgctttcatcggtgaaatacgcaggctgtccgtgggagctgggacttgttgaaacacaacaggcgctggttgccaacggcttgcgtcataaaatccgtttgcaggtcgatggcggcctgaaaacgggtgtcgatatcatcaaagcggcgattctcggcgcagaaagcttcggcttcggcactggcccaatggtcgcgctcggctgtaaatatctgcgtatttgccacctgaacaactgcgcaacgggtgtggcaactcaggatgacaaactgcgtaagaatcactatcacggcctgccgttcaaggtgacgaattactttgagtttatcgcccgtgaaacccgcgagctgatggcacagcttggcgtaacacgtctggtggatctgattggtcgcaccgacctgctgaaagagctggacagtttcaccgccaaacagcagaaactggcgctgtcgaagctgctggagaccgccgaaccgcatccaggtaaggcactctactgcaccgaaaccaacccgccgtttgataacggcctgctgaacgcgcagttgctgcaacaggcgaaaccgtttgtcgatgagcgccagagcaaaaccttctggttcgatatccgcaacaccgaccgctctgtcggcgcgtcgctttcaggctatatcgcccagacgcacggcgatcaggggctggcagccgatccgattaaagcgtacttcaacggcaccgcaggccagagcttcggcgtgtggaacgcgggcggcgtggaactgtacctgaccggtgatgccaacgactatgtcggtaaaggcatggcgggcggcttaatcgccattcgtcctccggttggttccgccttccgcagccatgaagcaagtattatcggcaacacctgcctgtatggagcgacgggtggtcgtctgtatgccgcaggccgcgcgggtgaacgtttcggcgtgcgtaactccggtgcaatcaccgtggtagaaggcattggcgacaacggctgtgaatatatgacgggcggtatcgtctgtattctgggtaaaaccggcgttaacttcggtgcgggtatgaccggcggcttcgcttacgttctcgatgaaagcggcgatttccgcaaacgcgttaacccggaactggtggaagtattaagcgttgacgatttggcgatccatgaagagcatctgcgtggtcttatcaccgagcatgtgcagcataccggttcccagcgtggtgaagagattctggcgaactggtcaaccttcgccactaaatttgcgctggttaaaccgaagtccagtgatgtcaaagcactgctgggtcatcgtagtcgtagcgcagcagagttgcgcgtgcaggcgcagtaa

SEQ ID NO: 118 - DNA, 819 bp, Escherichia coli
atggaaacctatgctgtttttggtaatccgatagcccacagcaaatcgccattcattcatcagcaatttgctcagcaactgaatattgaacatccctatgggcgcgtgttggcacccatcaatgatttcgtcaacacactgaacgctttctttagtgctggtggtaaaggtgcgaatgtgacggtgccttttaaagaagaggcttttgccagagcggatgagcttactgaacgcgcagcgttggctggtgctgttaacaccctcaagcggttagaagatggacgcttgctgggtgacaataccgatggtgtaggcttgttaagcgatctggaacgtctgtcttttatccgtcctggtttacgtattctgctcatcggcgcaggtggagcatctcgcggcgtactactgccacttctttccctggactgtgcggtgacaatcactaatcggacggtatcccgagcggaagagttggctaaattgtttgcgcacactggcagtattcaggcgttgggtatggacgaactggaaggtcatgagtttgatctcattattaatgccacatccagtggcatcagtggtgatattccggcgatcccgtcatcgctcattcatccaggcatttattgctatgacatgttctatcagaaaggaaaaactccttttttggcatggtgtgagcagcgaggctcaaagcctactgctgatggtttaggaatgctggtggcacaggcggctcatgccttccttctttggcatggcgttctgcctgatgtagaaccagttataaagcaattgcaggaggaattgtccgcgtga

SEQ ID NO: 119 - DNA, 315 bp, Escherichia coli
atggcagcgaaaatccgtcgtgatgacgaagttatcgtgttaaccggtaaagataaaggtaaacgcggtaaagttaagaatgtcctgtcttccggcaaggtcattgttgaaggtatcaacctggttaagaaacatcagaagccggttccggccctgaaccaaccgggtggcatcgttgaaaaagaagccgctattcaggtttccaacgtagcaatcttcaatgcggcaaccggcaaggctgaccgtgtaggctttagattcgaagacggcaaaaaagtccgtttcttcaagtctaacagcgaaactatcaagtaa

SEQ ID NO: 120 - DNA, 813 bp, Escherichia coli
atgaaatcactgtttaaagtaacgctgctggcgaccacaatggccgttgccttgcatgcaccaatcacttttgctgctgaagctgcaaaacctgctacaactgctgacagcaaagcagcgttcaaaaatgacgatcagaaatcagcttatgcactgggtgcctcgctgggtcgttacatggaaaactctctaaaagaacaagaaaaactgggcatcaaactggataaagatcagctgatcgctggtgttcaggatgcatttgctgataagagcaaactctccgaccaagagatcgaacagactctgcaagcattcgaagctcgcgtgaagtcttctgctcaggcgaagatggaaaaagacgcggctgataacgaagcaaaaggtaaagagtaccgcgagaaatttgccaaagagaaaggtgtgaaaacctcttccactggtctggtttatcaggtagtagaagccggtaaaggcgaagcaccgaaagacagcgatactgttgtcgtgaactacaaaggtacgctgatcgacggtaaagagttcgacaactcttacacccgtggtgaaccgctctctttccgtctggacggtgttatcccgggttggacagaaggtctgaagaacatcaagaaaggcggtaagatcaaactggttattccaccagaactggcttacggcaaagcgggtgttccggggatcccaccgaattctaccctggtgtttgacgtagagctgctggatgtgaaaccagcgccgaaggctgatgcaaagccggaagctgatgcgaaagccgcagattctgctaaaaaataa

SEQ ID NO: 121 - DNA, 2544 bp, Escherichia coli
atgagcaaagtcagactcgcaattatcggtaacggtatggtcggccatcgctttatcgaagatcttcgtgataaatctgatgcggccaactttgatattaccgttttctgtgaagaaccgcgcatcgcttatgaccgcgtacacctctcgtcttacttctctcaccacaccgccgaagagctgtcgctggtgcgcgaaggcttctacgagaaacacggcatcaaagttctggtcggcgaacgcgctatcaccatcaaccgtcaggagaaggtgattcactccagcgccggacgtaccgttttttatgacaagctgatcatggcgaccggttcctacccgtggatcccgccaattaaaggttctgatactcaggactgctttgtctatcgcaccattgaagacctcaacgccattgaatcctgcgcccgtcgcagcaaacgcggtgccgttgttggtggcggcctgttaggtctggaagccgctggcgcgctgaaaaacttaggtattgaaacccacgttatcgaatttgcccctatgctgatggcagaacagcttgatcagatgggtggcgagcagctgcgtcgcaaaatcgagagcatgggcgtgcgcgttcacaccagcaaaaacacccttgagattgtgcaggaaggtgttgaagcgcgtaaaaccatgcgttttgccgacggcagcgaactggaagtcgactttatcgtcttctctaccggtatccgtccgcgcgataagctggcaacccagtgtggtctggacgttgctccgcgtgggggtattgtcattaatgattcctgccagacttccgatccggatatctacgccatcggtgaatgcgcaagctggaacaaccgtgtatttggtctggtagcaccaggctacaaaatggcgcaggtcgccgttgaccatattctcggtagcgaaaacgcctttgaaggtgctgaccttagcgccaagctgaaactgctgggcgtagacgtaggcggtattggtgatgcgcacggtcgcacgcctggcgcacgtagctacgtttacctcgacgaaagcaaagagatctacaaacgccttattgtcagcgaagacaacaaaaccctgctcggtgcggtactggtgggcgataccagcgactacggcaacctgctgcaactggtgctgaatgctatcgagctgccggaaaacccggattctctgattctgccggcgcactcgggtagcggtaagccgtctatcggtgttgataaactgccggacagcgcgcaaatctgctcctgcttcgacgtcaccaaaggtgatctgattgctgccatcaacaaaggctgtcacaccgttgcggcgctgaaagccgaaaccaaagcgggtactggctgcggtggctgtatcccgctggtcactcaggtactgaacgcggaactggcgaaacagggcatcgaagttaacaacaacctgtgcgaacactttgcttattcgcgtcaggaactattccatttgatccgcgttgaaggcattaaaaccttcgaagaactgctggcgaaacacggcaaaggttacggttgtgaagtttgtaaaccgaccgtcggttcgctgctggcctcctgctggaacgaatacattctgaagccggaacatactccgctgcaggattctaacgacaacttcctcgctaacatccagaaagacggcacctactcggtgatcccgcgctctccgggcggtgaaatcaccccggaagggctgatggcggtaggtcgtatcgcgcgtgaatttaatctctacaccaagatcactggctcccagcgtctggcgatgtttggcgcacagaaagacgatctgccggagatctggcgtcagctgattgaagccggcttcgaaaccggtcatgcctatgcgaaagcactgcgtatggcgaaaacctgcgtgggtagcacctggtgccgctacggcgttggcgacagcgtcggcctcggcgtggaactggaaaaccgctacaaaggcatccgtacgccgcacaaaatgaagttcggtgtctccggctgtacccgtgaatgttcagaagctcagggtaaagacgtgggtattatcgccactgaaaaaggctggaacctgtatgtttgcggtaacggcggcatgaaaccgcgtcatgcggatctgctggcggcggatatcgatcgcgaaacgctgatcaaatatctcgaccgcttcatgatgttctacatccgtactgccgacaaactgacgcgtaccgcaccgtggttagaaaacctcgaaggcggcatcgattacctgaaagcggtgatcattgacgacaaactggggctgaacgcacatctggaagaagagatggcgcgcctgcgtgaagcggtagtgtgtgagtggactgaaacggtcaatacgccgtctgcgcagactcgcttcaaacacttcatcaacagcgacaagcgtgacccgaacgtgcagatggtgccagagcgcgaacagcaccgtccggcaacgccgtatgaacgtatcccagtaactctggtggaggacaacgcatga

SEQ ID NO: 122 - DNA, 1239 bp, Escherichia coli
atgaagcaatggatagccgcactactgttgatgctgatacccggcgtacaggcggcaaagccgcaaaaagtgacgctgatggtggatgacgttccggtagctcaggtgttgcaggcgctggctgaacaggagaagttgaacctggtggtgtcgccagacgtcagcggtacggtgtcgttacatctaacagatgttccctggaagcaggcactacaaactgtagtgaaaagcgccggactgataacgcgccaggagggcaacattctctcagtgcattccattgcctggcagaatgacaatatcgcccgtcaggaagcggagcaggcgcgggcgcaggcaaatctgccgctggaaaatcgcaatattactctgcaatacgccgacgccggagagctggcgaaagctggggagaagctactgagtgccaaagggagtatgaccgtcgataaacgcaccaatcgccttttgctacgagataacaaaacggcgttaagcgcccttgaacagtgggtagcgcaaatggatctgccggtcgggcaggttgagctgtcggcgcatattgtcaccattaatgaaaaaagtttgcgtgagttaggcgtgaaatggacgctggccgatgcgcaacacgctggtggcgttgggcaagtcaccacgcttggtagcgacctctccgtagcgacggcgacaacgcatgtcggttttaacattgggcgcatcaacggacgtttgctggatcttgagctttccgcgctcgaacaaaaacagcagctggatattatcgccagtccgcgtctgctggcctcacatcttcagcctgccagcattaaacaggggagcgaaattccatatcaggtttccagcggggaaagtggcgcgacgtcggtggaatttaaagaggccgtcctggggatggaggtcacgcccacggtgttacaaaaaggtcgcatccggctgaaattacacatcagccagaacgttccggggcaggtgctacagcaggccgatggcgaagtgctggcgattgataagcaggagatcgaaacgcaggtcgaggtcaaaagcggagaaacgttggcgctgggcggcatttttacccgtaaaaataaatcgggtcaggatagcgtgccgttgcttggcgacattccctggttcgggcaattatttcgtcatgacggaaaagaagatgaacgacgcgagttagtggtgtttatcacgccacgactggtttccagtgagtaa

SEQ ID NO: 123 - DNA, 2223 bp, Escherichia coli
gtgccttttattgcacgttatcgtaaggaaatcaccggcggtctggatgacacgcagctgcgtaatctggaaacgcgtctgggatacctgcgcgagctggaagagagacgtcaggcgatcctcaagtccatttccgagcaaggcaaactcaccgatgatctggcgaatgccatcaacgccaccctaagcaaaaccgaactcgaagacctctacctgccctacaaacctaaacgccgcacccgcgggcaaatcgccattgaagcagggcttgagccgttggctgacctgctgtggagcgatccgtcacacacgccagaagtcgccgctgcgcaatatattgatgccgataaaggcgtggcagataccaaagccgcgctggacggcgcgcgctatatcctgatggaacggtttgccgaagatgccgcgctgctggcgaaagtgcgtgattatctgtggaagaacgcgcatttggtttctacggtggtgagcggtaaagaagaggaaggggcgaaattccgcgactatttcgatcatcacgaaccgttgtccacggtgccttctcaccgcgcgctggcgatgttccgtgggcgtaacgaaggcgtacttcagctttcgctgaatgccgatccacagttcgatgagccgcccaaagagagctattgcgagcaaatcatcatggatcaccttggcctgcgcctgaacaatgccccggcggatagctggcgcaaaggcgtggtgagctggacgtggcgcatcaaggtgctgatgcatctggaaaccgaactgatgggcaccgtgcgcgaacgtgcggaaaatgaagcaatcaacgtctttgcccgtaacctgcacgatctgctgatggctgcccctgccggactgcgtgcaacgatgggcctcgatccgggtctgcgtaccggggtaaaagtggcggtggtcgatgccactggcaaactggtagcgaccgataccatttacccgcacaccggacaagccgcaaaagcagcgatgactgttgctgcgctgtgtgaaaagcataacgttgaactggtggcgatcggcaacggtacagcttcccgcgaaaccgaacgtttctatctcgacgtgcagaagcagttcccgaaagtgaccgcacagaaagtgatcgtcagcgaagctggcgcgtcggtttactcggcttccgagctggcagcgcaggagttcccggatctcgacgtttcgctgcgtggcgcggtttctatcgcccgccgtttgcaggatccgctggcggagctggtgaaaatcgatccgaaatctatcggcgtaggtcagtatcagcatgacgtcagccagacgcaactggcccgcaaactggatgcagtagtagaagactgcgtaaacgccgttggcgtcgatctcaacaccgcttctgttccgctattaactcgcgtggcgggcctgacgcgaatgatggcgcaaaacatcgtggcctggcgcgatgagaacggccagttccagaaccgtcagcaactgctgaaagtcagccgtctggggccgaaagccttcgagcagtgcgcgggcttcctgcgcattaaccacggtgacaacccgctggacgcctctaccgttcacccggaagcctatccggtggtggaacgcattctggcagcaacacagcaggcactgaaagatctgatgggtaacagcagcgaactgcgtaacctgaaagcgtctgactttactgatgaaaaattcggtgtgccgacagtaactgacatcatcaaagagctggaaaaaccgggtcgcgatccgcgtccggaatttaaaaccgctcagtttgccgatggcgtcgagacaatgaacgacctgcaaccgggtatgatcctcgaaggcgctgtcaccaacgtcaccaactttggcgcgtttgtcgatatcggcgtgcatcaggacggcctggttcacatctcttcattgtcgaacaagtttgtggaagatccgcataccgtggtgaaagcgggcgacattgtgaaggtgaaagtgctggaagtggatcttcagcgtaaacgtatcgccctgactatgcgtctggacgagcagcctggcgaaaccaactctcgtcgcggcggcggtaacgatcgcccgcaaaacaaccgcccggcagccaaaccacgcggtcgtgaagcgcagcctgccggtaacagcgcgatgatggacgcgctggcggcagcaatgggcaaaaaacgttaa

SEQ ID NO: 124 - DNA, 2085 bp, Escherichia coli
atggaaagcaaacgtctggataatgccgcgctggcggcggggattagccctcattacatcaatgcccacggtaaaccgcagtcgattagcgccgaaaccaaacggcgtttgcttgacgcgatgcatcaacgtaccgccacgaaagtggcggtaacgccagtcccgaatgtcatggtttataccagcggcaaaaaaatgccgatggtggtggagggcagcggcgaatatagctggctgctgaccaccgaagaaggaacgcagtacaaaggccatataacggggggcaaagcgttcaatctaccgacgaagctgccggaaggttatcacacgctgacgcttacccaggaagaccagcgcgggcattgcagggtgattgtcgccccgaaacgctgttacgaaccgcaggcgttgctgaataaacaaaagctgtggggtgcctgcgtccagctttatacgctgcgatcggaaaaaaactggggtattggggattttggcgatctcaaagcgatgctagtggatgtggcaaaacgtggcggatcgttcattggtctgaacccgattcatgcgctctatccggcaaatccggagagcgccagcccgtatagcccgtcttctcgccgctggctgaatgtgatttatatcgacgttaacgccgtcgaagatttccatcttagcgaagaggctcaggcctggtggcagttgccgaccacgcaacagacgctgcaacaggcgcgggatgccgactgggtcgattactccacggttaccgccctaaaaatgacagcattacgaatggcgtggaaaggtttcgcgcaacgtgatgatgagcagatggccgcgtttcgccagtttgttgcagatcaaggcgacagcctgttctggcaggcagcctttgatgcgctacatgcccagcaagtgaaagaggacgaaatgcgctggggctggcctgcatggccagagatgtatcagaacgtggattcaccagaagtgcgtcagttctgcgaagaacatcgcgatgacgttgatttttatctctggttgcagtggcaggcttacagccagtttgccgcctgctgggagataagccagggctatgaaatgccgattggcttgtatcgtgatctggcggttggcgtagcggaaggtggggcggaaacctggtgcgaccgtgaactgtattgcctgaaagcgtcggttggcgcgccgccggatatcctcggcccgttggggcagaactggggattgccgccaatggacccgcatatcatcaccgcgcgtgcttatgaaccgtttatcgagctgttgcgtgccaatatgcaaaactgcggcgcattacgaattgaccatgtgatgtcgatgctgcgtttgtggtggataccgtatggcgagacggcagatcagggcgcgtatgttcactatccggtggatgatctgctctcgattctggcactcgaaagtaaacgtcatcgctgtatggtgattggtgaagatctcggtaccgtaccggtagagattgtcggtaagctgcgcagcagcggtgtgtactcctacaaagtgctctatttcgaaaacgaccacgagaagacgttccgtgcaccgaaagcgtatccggagcagtcgatggcggttgcggcgacacatgacctgcctacgctacgcggctactgggagagcggggatctaacgctgggcaaaaccctggggctgtatccggatgaagtggtactgcgcggtctgtatcaggatcgcgaactggcgaagcaagggctgctggatgcactgcataaatatggttgtctgccaaaacgtgccgggcataaggcatcgttgatgtcgatgacgccgacgcttaatcgtggtttgcagcgctacattgccgacagtaacagtgctctgttaggactacagccggaagactggctggatatggccgaaccggtgaatattcctggcaccagttaccagtataaaaactggcgacgcaagctttccgcaacgcttgagacgatgtttgccgatgatggcgtgaacaagttgctgaaggatttggacagacggcgcagagctgcagcgaagaagaagtag

SEQ ID NO: 125 - DNA, 585 bp, Escherichia coli
atgatcaaatccacattctggcgagcgttcgccctgaccgctacgcttatcctcaccggctgtagccactcgcaaccagaacaggaaggccgcccgcaggcgtggctgcaacctggcacgcgcatcacgctgccggcaccagggatttcacccgcagtcaattcgcagcaactgttgaccggcagcttcaacggcaaaacccagtcgctgttagtgatgcttaacgccgacgatcagaaaatcacccttgccgggctgtcgtcggtcggcattcgcctgtttctggtgacctacgatgcgcaagggctacgcgccgagcaatccatcgtcgtcccacagttaccgcccgcaagtcaggtactggctgacgtgatgctcagccactggccgattagcgcctggcaaccgcaacttcccgcaggatggacacttcgcgacaacggtgacaaacgcgagctgcgtaacgccagcggcaaactggtcacggaaatcacctatctgaatcgcaagggcaaacgcgtgccaatcagcattgagcagcatgtctttaaataccacatcaccattcaatacttaggtgactga

SEQ ID NO: 126 - DNA, 765 bp, Escherichia coli
atgccgcaacagattgaactacgtaatatcgcgctacaggccgcgcagccgctggtgcacggcgtgtcgttaaccctgaaacgcgggcgcgtgctggcgttagtcggcggtagcggcagcgggaaatcattaacctgcgccgcgacgctgggaattctgcccgcaggcgttcgccagacggcgggggaaattttagccgatggcaaaccggtttctccctgcgccctgcgcggcatcaaaattgccaccatcatgcagaacccgcgcagcgcctttaatccactgcacaccatgcacacccacgcgcgggagacgtgcctggcgctggggaaacccgccgatgacgctacgcttaccgctgccatagaagcggtggggctggaaaacgccgcacgcgtgctgaagctgtacccgttcgagatgagcggcggcatgttgcagcgcatgatgattgcgatggcggtgctttgcgaatcaccgtttatcatcgccgatgaaccaaccaccgacctcgacgtggtagcacaggcacgcattctcgatctgctggaaagcattatgcaaaaacaggcgccggggatgctgctggtcacccatgatatgggcgtggtggcgcgtctggcggatgacgtagcggtaatgtctgacggtaagattgtcgaacagggcgatgtcgaaacgctgtttaacgcccccaaacatgcggtaacgcgcagcctggtttccgctcatctcgccctctacggtatggagctggcatcatga

SEQ ID NO: 127 - DNA, 807 bp, Escherichia coli
atgactttacttaacgtctccgacctttcccatcactatgcccacggtgggtttagcggaaaacatcagcaccaggcggtgctgaataacgtttccctgaccctgaaaagcggtgaaaccgtcgccctgctgggacgcagcggctgcggaaaaagcactctctcgcggctactggtaggcttagaatcgccctcacagggaaatattagctggcgtggcgaatcgttggcaaagctcaatcgcgcccagcgtaaagcgttccgccgcgatattcagatggtatttcaggactccatcagcgccgtgaatccgcgcaaaaccgtgcgcgagatcctgcgggaaccgatgcgccacctgctatcgctgaaaaaatccgaacaactggcgcgtgccagcgaaatgctgcacgcggtcgatctcgacgacagcgtgctcgacaagcgcccaccgcagttaagcggcggccagctccagcgcgtctgcctggcacgcgcgctggcggtcgaaccgaaattgctgattctggatgaagccgtttctaaccttgatctcgtgttacaggcgggcgtcattcgcctgctgaaaaagctacaacaacagtttggcactgcctgcctgttcatcactcatgacttacgcctggtggaacgcttttgccagcgagtgatggtgatggacaacggacaaatcgtcgaaacccaggcggtgggagagaaattaaccttttcctctgacgccggacgtgtgctacaaaacgcgatattacccgcattccccgtgcgccgtcgcgccacagaaaaggtttaa

SEQ ID NO: 128 - DNA, 3009 bp, Escherichia coli
gtggcgaaaattccggctcgccgtggcgaagcgattaatcagttaaaacgcatcaatgcggatgaaccgggcaatacgggcctgcaaaacaatctggcgctattgctgtttagtagcgatcgccgtgacgaaggttttgccgtcctggaacagatggcgaaatcgaacgccgggcgcgaaggggcctctaaaatctggtacgggcagattaaagacatgcccgtcagtgatgccagtgtgtcggcgctgaaaaaatatctttctatctttagtgatggcgatagcgtggcggctgcgcaatcgcaactggcagaacagcaaaaacagctggccgatcctgctttccgcgctcgtgcgcaaggtttagcggcggtggactctggtatggcgggtaaagccattcccgaactacaacaggcagtgcgggcaaacccgaaagacagtgaagctctgggggcgctgggccaggcatattcacagaaaggcgatcgcgccaatgcagtggcgaatctggaaaaagccctcgcactggatccgcacagcagcaacaacgacaaatggaacagtctgctgaaagtaaaccgctactggctggcgatccagcagggcgatgctgcgctgaaagccaataatcctgaccgggcagaacgcctgttccagcaggcgcgtaatgtcgataacaccgacagttatgcagtgctggggctgggcgatgtggcgatggcgcgaaaagattatcccgccgccgaacgttattatcagcagaccttgcgtatggacagcggcaacactaacgccgtgcgcgggctggcaaatatttaccgccagcaatcgccagaaaaagctgaagcgtttatcgcctcactctctgccagtcagcggcgtagcattgatgatatcgaacgcagcctgcaaaacgaccgtctggcacagcaggcagaggcactggaaaaccagggcaaatgggcgcaggcggcagcacttcagcggcaacgactggcgctggaccccggcagcgtatggattacttaccgactttcgcaggatctctggcaggccggacaacgcagccaggccgatacgttaatgcgcaatctggcgcagcagaagccgaacgacccggagcaggtttacgcttacgggctgtacctctctggtcatgaccaggacagagcggcgctggcgcatatcaacagcctgccgcgtgcgcagtggagcagcaatattcaggagctggttaatcgactgcaaagcgatcaggtgctggaaaccgctaatcgcctgcgagaaagcggcaaagaagctgaagcggaagcgatgctgcgtcagcaaccaccttccacgcgtattgacctcacgctggctgactgggcgctgcagcgacgtgattacaccgccgcccgcgctgcatatcagaatgtcctgacgcgggagccaactaacgccgatgccattcttggtctgacggaagtggatattgctgccggtgacacagcggcggcacgtagccagctggcgaaactgcccgctactgataacgcctcgctgaacacacagcggcgcgtggcgctggcgcaggcgcagcttggagataccgcagcggcgcagcagacgtttaataagttgatcccgcaggcaaaatctcagccaccgtcgatggaaagcgcgatggtgctgcgcgacggtgcgaagtttgaagcgcaggcgggcgatccaaagcaggcgctggaaacctacaaagacgccatggtcgcatccggtgtgactacgacgcgtccgcaggataacgacacctttacccgactgacccgtaacgacgagaaagatgactggctgaaacgcggcgtgcgcagcgatgcggcggacctctatcgccagcaggatcttaacgtcaccctcgagcatgattattggggttcgagcggcaccggtggttactccgatctgaaagcgcacactaccatgttgcaggtggatgcgccgtattctgacgggcggatgttctttcgcagtgatttcgtcaatatgaacgtcggcagtttctccactaatgccgatggcaaatgggatgacaactggggcacctgtacattacgggactgtagcggcaaccgcagccagtcggattccggtgccagcgtggcggtcggctggcgaaatgacgtctggagctgggatatcggcaccacgccgatgggcttcaacgtggtggatgtggtcggcggcatcagttacagcgatgatatcgggccgctgggttacaccgttaacgcccaccgtcgtcccatctccagttctttgctggcctttggtgggcaaaaagacttcccgagcaataccgggaaaaaatggggcggcgtgcgtgccgacggcgtggggctaagcctgagctacgataaaggtgaagcaaacggcgtctgggcatcgcttagtggcgaccagttaaccggtaaaaatgtcgaagataactggcgtgtgcgctggatgacgggctattactataaggtcatcaaccagaacaatcgccgcgtcacaatcggcctgaacaacatgatctggcattacgacaaagacctgagtggctactcactcggtcagggcggttactacagcccgcaggaatacctgtcgtttgccataccggtgatgtggcgggagcgcacggaaaactggtcgtgggagctgggggcgtctggctcgtggtcgcattcacgcaccaaaaccatgccgcgttatccgctgatgaatctgatcccgaccgactggcaggaagaagctgcgcggcaatccaacgatggcggcagcagtcagggcttcggctatacggcgcgggcattacttgaacgacgtgttacttccaactggtttgtcggcacggcaattgatatccagcaggcgaaagattacgcccccagccatttcctgctctacgtacgttattccgccgccggatggcagggtgacatggatttaccgccgcagccgctgataccttacgccgactggtaa

SEQ ID NO: 129 - DNA, 2358 bp, Escherichia coli
atgaaaagaaaactattctggatttgtgcagtggctatggggatgagtgcgttcccctctttcatgacgcaggcgacgccagcaacgcaaccactgatcaatgctgagccagctgtagccgcccagacggaacaaaatccgcaggtggggcaagtgatgccgggcgtgcagggcgctgatgcgccagtcgtggcgcagaacggtccttcgcgtgatgtgaagctgacctttgcgcaaattgcgccgccgccgggcagcatggtgctacgtggcattaacccgaacggcagcattgagtttggtatgcgcagcgatgaagtggtgacgaaggcgatgctcaacctcgaatacacgccatcgccatcgttactgcctgtccagtcgcagttaaaggtttatctcaatgatgagctgatgggcgtgctgccagtgaccaaagaacagttgggtaaaaaaacgctggcgcaaatgcccattaatccactgtttattaccgacttcaaccgtgtgcggctggagtttgtcggccattatcaggacgtgtgcgaaaacccggccagcaccacgctttggctggatgttgggcggagcagtggactggatctgacctatcagaccctgaatgtgaagaatgacctgtcacacttcccggtgccattctttgacccgcgtgataaccgcaccaacaccttgccgatggtctttgcgggtgcgccggatgttgggctgcaacaagcatctgccattgtcgcctcgtggtttggttcgcgttctggctggcgtgggcagaacttcccggtgctctataaccaactgccggatcgtaatgccattgtctttgcaaccaacgacaaacggccggacttcctgcgcgatcatccggcggtaaaagccccggtgattgagatgattaaccatccgcagaatccttacgtcaaactgctggtggtgtttggtcgtgacgacaaagacctgttgcaggcagcgaaaggtatcgctcagggtaacattctgttccgtggtgaaagcgtggtagtgaatgaagtgaaaccgctgctaccgcgtaagccgtacgatgcgccgaactgggtgcgtaccgatcgtccggtcacctttggtgaactgaaaacctatgaagaacagttacaatccagcggtcttgagccagcagcgattaatgtttcgctaaacctgccgccagatctctacctgatgcgcagtaccggcattgatatggatattaattaccgctacaccatgccgccggtgaaagacagttcgcggatggatatcagcctgaataaccagttcctgcaatccttcaacctgagcagcaaacaggaggcgaaccgcctgctgctgcggattccggtattacaaggtttgctggatggcaaaacggatgtctctattccggcgctgaaactgggcgcgaccaaccagctgcgcttcgactttgagtatatgaacccgatgcctggcggttcggtggataactgtattaccttccagccggtgcagaatcatgtggtgattggtgacgactccaccatcgacttctcgaagtattaccacttcatcccgatgccggatctacgcgcctttgctaacgcgggcttcccgttcagccggatggcggatctgtcgcaaaccatcaccgtgatgccgaaaacgcctaacgaagcacagatggaaacgttgctgaatactgttggttttatcggcgcacagacgggcttcccggcgattaatctgacggtgaccgatgatggcagcaccattcagggcaaagatgccgacatcatgatcatcggtggtatcccggacaaactgaaagacgataagcagatcgacctattggtgcaggcgaccgaaagctgggtgaaaacaccgatgcgccagaccccgttccccggcattgtgccggacgagagcgatcgcgcggcagaaacccagtcaacgctgacctcttccggtgcgatggcggcggtgattggcttccagtcgccgtataacgaccagcgcagcgtgattgcgctgctggcagatagcccacgcggttatgaaatgcttaacgatgcggtgaacgatagcggcaaacgcgccaccatgttcggttcggtcgcggtgatccgcgagtccggtatcaacagcctacgtgttggcgacgtttattacgtaggtcatctgccgtggttcgagcgcttgtggtatgcgctggcaaaccatccgattctgctggcggtgctggcggtgctggcggtgctggcggctatcagtgtgatattgctggcatgggtactgtggcgtttgctgcgtattatcagccgtcgtcgtcttaacccggataacgagtaa

SEQ ID NO: 130 - DNA, 2667 bp, Escherichia coli
gtgcctgttgaactattccgggctgaaaacgccagtcgggagtgcatcatgagtatcctgacccggtggttgcttatcccgccggtcaacgcgcggcttatcgggcgttatcgcgattatcgtcgtcacggtgcgtcggctttcagcgcgacgctcggctgtttctggatgatcctggcctggatttttattccactggagcacccgcgctggcagcgtattcgcgcagaacataaaaacctgtatccgcatatcaacgcctcgcgtccgcgtccgctggacccggtccgttatctcattcaaacatgctggttactgatcggtgcatcgcgcaaagaaacgccgaaaccgcgcaggcgggcattttcaggtctgcagaatattcgtggacgttaccatcaatggatgaacgagctgcctgagcgcgttagccataaaacacagcatcttgatgagaaaaaagagctcggtcatttgagtgccggggcgcggcggttgatcctcggtatcatcgtcaccttctcgctgattctggcgttaatctgcgttactcagccgtttaacccgctggcgcagtttatcttcctgatgctgctgtgggggggagcgctgatcgtacggcggatgccggggcgcttctcagcgctaatgttgattgtgctgtcgctgactgtttcttgccgttatatctggtggcgatatacctctacgctgaactgggacgatccggtcagcctggtgtgcgggcttattctgctcttcgctgaaacgtacgcgtggattgtgctggtgctcggctacttccaggtagtatggccgctgaatcgtcagccggtgccattgccgaaagatatgtcgctgtggccgtcggtggatatctttgtcccgacttacaacgaagatctcaacgtggtgaaaaataccatttacgcctcgctgggtatcgactggccgaaagacaagctgaacatctggatcctcgatgatggcggcagggaagagtttcgccagtttgcgcaaaacgtgggggtgaagtatatcgcccgtaccactcatgaacatgcgaaagcgggcaacatcaacaatgcgctgaaatatgccaaaggcgagttcgtgtcgattttcgactgcgaccacgtaccaacgcgatcgttcctgcaaatgaccgtgggctggttcctgaaagagaaacagctggcgatgatgcagaccccacaccatttcttctcgccggacccgtttgaacgcaacctggggcgttttcgtaaaacaccgaacgaaggcacgctgttctatggtctggtgcaggatggcaacgatatgtgggacgccactttcttctgcggttcctgtgcggtgattcgccgtaagccgctggatgaaattggcggcattgctgtcgaaactgtgactgaagatgcgcatacttctctgcgtttgcaccgtcgtggctatacctccgcgtatatgcgtattccgcaggcggcggggctggcgaccgaaagtctgtcggcgcatatcggtcagcgtattcgctgggcgcgcgggatggtgcaaatcttccgtctcgataacccgctcaccggtaaagggctgaagtttgctcagcggctgtgctacgtcaacgccatgttccacttcttgtcgggcattccacggctgatcttcctgactgcgccgctggcgttcctgctgcttcatgcctacatcatctatgcgccagcgttgatgatcgccctgttcgtgctgccgcatatgatccatgccagcctgaccaactccaagatccagggcaaatatcgccactctttctggagtgaaatctacgaaacggtgctggcgtggtatatcgcaccaccgacgctggtggcgctgattaacccgcacaaaggcaaatttaacgtcaccgccaaaggtggactggtggaagaagagtacgtcgactgggtgatctcgcggccctacatcttccttgttctgctcaacctggtgggcgttgcggtaggcatctggcgctacttctatggcccgccaaccgagatgctcaccgtggtcgtcagtatggtgtgggtattctacaacctgattgttcttggcggcgcagttgcggtatcggtagaaagcaaacaggtacgccgatcgcaccgcgtggagatgacgatgcccgcggcaattgcccgcgaagatggtcacctcttctcgtgtaccgttcaggatttctccgacggtggtttggggatcaagatcaacggtcaggcgcagattctggaagggcagaaagtgaatctgttgcttaaacgcggtcagcaggaatacgtcttcccgacccaggtggcgcgcgtgatgggtaatgaagttgggctgaaattaatgccgctcaccacccagcaacatatcgattttgtgcagtgtacgtttgcccgtgcggatacatgggcgctctggcaggacagctacccggaagataagccgctggaaagtctgctggatattctgaagctcggcttccgtggctaccgccatctggcggagtttgcgccttcttcggtgaagggcatattccgtgtgctgacttctctggtttcctgggttgtatcgtttattccgcgccgcccggagcggagcgaaacggcacaaccatcggatcaggctttggctcaacaatga

SEQ ID NO: 131 - DNA, 4767 bp, Escherichia coli
atgaacaaaatatttaaagttatctggaaccctgcgacagggaattatactgttaccagcgaaacggcaaaaagccgtggcaagaaatctgggcgcagtaagctgttaatttctgcgctggttgcgggtggaatgttgtcgtcgtttggggcattggcgaatgccgggaatgacaacggtcagggtgttgattacggtagtggatcagctggcgacggctgggttgctataggcaaaggggcgaaagcaaatacttttatgaacaccagtggttccagtactgctgtgggttatgacgctatagctgaaggccaatatagctctgccatcgggtcaaaaacccatgcgattggtggtgcatcaatggcctttggggttagtgcaatatcagaaggcgatagaagtatagcactgggtgcctcttcgtattcattgggccaatactcaatggccctcggccgttattcaaaagcattgggtaaattgtctattgctatgggggactcttccaaagcggaaggagcaaacgccattgccctgggaaatgccactaaagctactgagattatgagtattgctcttggcgacaccgccaatgcgtcaaaagcgtattcaatggcgctgggagcaagtagcgtcgcatctgaagaaaacgctattgcgataggtgctgagaccgaagccgctgaaaatgcaactgctattggcaataatgcgaaggcaaaagggactaatagcatggcaatggggttcggaagccttgccgataaagtcaatactatcgcattaggaaatggcagccaggctctggcagataatgcaatcgccataggccagggcaacaaagctgatggcgtggatgccatcgctctgggtaatggtagccagtcgagaggcttaaacaccattgccttaggcacagccagtaatgcaactggtgataagagtcttgcgcttggtagtaatagcagtgccaacggtattaactctgtcgcgctgggcgcagattccattgcggatttagacaataccgtctctgtcggcaatagttcattaaaacgcaagatcgttaatgtgaaaaatggcgcgatcaagtctgacagttacgatgccattaatggttcacagctttatgccattagcgactcggtagcaaaaaggcttggaggaggggctgcagtagatgttgatgacggtactgttacagcaccaacctacaatttaaaaaatggtagcaaaaataacgtaggggctgcgctcgctgtacttgatgaaaacaccctgcaatgggaccaaaccaaaggcaaatacagcgctgctcatggtactagtagcccaactgccagcgtaatcaccgatgttgcggatggcacgatttcagcctccagtaaggatgcggttaacggttcccaactgaaagctaccaatgacgatgtcgaagccaacaccgccaatatcgctactaataccagcaacattgccacgaatacggcaaatattgccaccaataccaccaatatcaccaacctgacggattccgttggtgaccttcaggctgatgccctgctctggaacgaaactaaaaaggcattcagtgcagctcacggccaggataccaccagcaaaatcaccaacgttaaagatgccgacctgacggctgacagcactgatgctgttaacggctctcagctgaaaaccaccaacgatgctgtggcgacgaataccaccaatatcgccaataacacttccaatattgccactaacaccaccaacatctctaacctgactgagacggtgactaatcttggtgaggatgcgctgaaatgggataaggacaatggtgtattcacggcagctcatggcaccgagaccaccagcaaaatcaccaacgttaaagatggcgacctgacgactggcagcaccgatgccgttaacggctctcagctgaaaaccaccaacgatgccgtggcgacgaataccaccaatatcgccactaacaccaccaacatctctaatctgactgagacggtgactaatcttggtgaggatgcgctgaaatgggataaggacaatggtgtcttcactgcagctcatggcaacaataccgccagcaaaatcaccaatatcctggacggcacagtcactgcaaccagttccgatgccattaacggtagccagctttatgacttaagcagcaatatcgccacctacttcggcggcaatgcttctgtgaatactgacggtgtgtttaccggtccaacctacaaaatcggtgaaacaaattattataacgtcggcgatgcactggctgcgattaactcctcatttagcacgtctctcggcgatgctctgctttgggatgccaccgcaggtaaattcagtgccaaacacggtactaatggtgacgcaagcgtgatcactgatgtcgcagatggtgaaatttcagactccagttctgacgcagtaaacggctcacaactccacggcgtgagcagttatgttgttgatgcgctggggggtggtgccgaagtcaatgcagacggcaccatcactgcgccgacgtacaccattgctaatgctgattacgataatgtcggtgatgccctgaatgctatcgataccactcttgacgacgctctgctctgggatgcggacgccggtgaaaatggtgcatttagcgccgctcacggaaaagataaaactgccagtgtaatcactaacgtcgctaacggtgcaatctctgctgccagcagcgacgcgattaacggctcacaactctataccaccaataagtacatcgctgatgcgctgggtggtgacgcagaagtcaacgctgacggcaccatcaccgcaccgacttacaccattgcgaacgccgagtacaacaacgtcggtgacgccctggatgcgcttgatgataacgccctgctgtgggatgagactgccaatggcggtgctggagcctacaatgccagccatgacggtaaagccagcatcatcactaatgtcgctaatggcagtattagtgaggacagtaccgatgcagtgaacggttctcagttgaatgcgacgaatatgatgattgagcagaacacccaaattatcaatcagctcgctggtaacaccgacgcaacctatatccaagaaaacggtgcgggtattaactatgtgcgtactaacgacgacggcttagcgttcaacgacgccagcgcacagggtgttggcgctacagctataggttataactctgtcgccaaaggcgatagcagcgtagctattggtcagggcagctacagcgacgttgatacgggtatcgccctgggtagcagctctgtttccagccgagtgattgccaaaggctcccgtgacaccagcataacggaaaatggcgttgttattggttacgacaccacggatggcgaactgctcggtgcattgtctatcggtgatgacggtaaatatcgtcaaatcatcaacgtagccgatggttccgaagcccatgacgccgttacggttcgtcaattgcagaatgcgattggtgcggtcgcaaccacgccgactaaatacttccacgctaattcaacggaagaagattcactggcagtgggaactgactcgctggcaatgggtgcgaaaaccatcgtgaatggcgataaaggtattggtatcggttatggtgcctacgtggacgcgaatgcacttaacggcattgccattggtagcaatgcgcaagtcattcatgtcaacagtattgcgataggtaatggttctacgaccactcgtggcgctcaaaccaattataccgcctacaacatggacgcaccgcagaactctgtcggtgaattctcagtcggtagtgcggatggtcaacgtcagatcactaacgtcgcagcaggttcggctgataccgatgcggtcaacgtgggtcagttgaaagtaacggatgcgcaggtttcccagaatacccagagcattactaacctggataatcgggtaacgaatcttgattcacgcgtcaccaatatcgaaaacggtattggcgatatcgtcaccaccggtagcaccaagtacttcaagaccaataccgatggtgtagatgccagcgcgcagggtaaagatagcgtcgcgattggttccggctccattgctgccgctgacaacagcgtcgctctgggtacagggtctgtggcaaccgaagaaaatacgatctctgtaggttcctctactaaccaacgtcgtatcaccaacgtagctgcaggtaaaaatgctaccgatgctgttaacgtggcacagttgaagtcttccgaagctggcggtgtacgttacgacaccaaagctgatggttctatcgactatagcaatatcaccctcggtggcggcaacggcggtacgactcgtatcagcaacgtctccgctggcgtcaacaacaacgacgtggtgaattacgcgcagttgaagcaaagcgtgcaggaaacgaagcaatacaccgatcagcgaatggttgagatggataacaaactgtctaaaactgaaagcaagttgagcggtggtatcgcttctgcaatggcaatgaccggtctgccgcaggcttacactccaggtgccagcatggcctctattggtggcggtacttacaacggtgaatcggcagttgctttaggtgtatcgatggtgagcgccaatggtcgttgggtctacaaattacaaggtagtaccaatagccagggtgaatactccgccgcactcggtgccggtattcagtggtaa

SEQ ID NO: 132 - DNA, 1251 bp, Escherichia coli
atgatggcgggaaccgttttgtatcaggaccgcgccatgaaacagataacctttgctccccgtaatcacctgctcaccaataccaatacctggacgcccgacagccagtggccggtatttgacgtgcgtccttctggcgcgtcgtttaccggcgagaccattgagcgtgtgaatatccataccggcgaggtcgaggttatctatcgcgtgtcacagggcgcgcacgtcggcgtggtgaccgttcatccaaagtcagagaaatatgtctttatccacggacctgaaaatcctcatgaaacatggcattacgatttccatcaccgtcgcggcgtgattgttgaaggcggcaagatgaacaatctcgatgcaatggatattaccgttccgtacacatcaggggcgctgcgtggcggcagccatgtgcatgtctttagcccgaacggtgaaatggtgagttttacctataacgaccatgtaatgcatcagttcgattcggcgctggatttgcgaaacgtcggggttgctgcaccgtttggcccggtcaacgtacaaaagcagcatccgcgtgaatacagcggtagccactggtgcgtgctggtgagtaaaaccacgcccacgccgcagcctggcagcgatgaaatcaatcgtgcttatgaagaaggatgggtaggaaatcacgcgctggcgtttattggcgacacactttcgccaaagggcgagaaagtgccggagctgtttatcgttgagttaccgcaagatgaagctggctggaaagcagcaggtgatgcgccgttaagtggaacggaaacaaccctgcccgcgccaccgcgtggcatcgtgcagcgacgtttaacctttacccaccatcgggcttatccggggttagtcaacgtcccgcgccactgggtgcgctgtaatccgcagggtacgcaaatcgcgtttttaatgcgagatgataacggcattgtgcaactgtggcttatctcgccacagggcggcgagccgcgccagttaacccataacaaaacggatattcagtctgcatttaactggcatccgtcaggagaatggttgggctttgtgctgggtaatcgaattgcttgtgcccatgcgcaaagcggcgaggttgagtatttaaccgaaaaccacgccaatccaccttctgcggacgccgtggtcttctcgccggatggtcagtggctggcgtggatggaaggcggccagctgtggatcaccgaaactgatcgctaa

SEQ ID NO: 133 - DNA, 1383 bp, Escherichia coli
atggctactggaaagattgtccaggtaatcggcgccgtagttgacgtcgaattccctcaggatgccgtaccgcgcgtgtacgatgctcttgaggtgcaaaatggtaatgagcgtctggtgctggaagttcagcagcagctcggcggcggtatcgtgcgtaccatcgcaatgggttcctccgacggtctgcgtcgcggtctggatgtaaaagacctcgaacacccgatcgaagtcccggtaggtaaagcgactctgggccgtatcatgaacgtactgggtgaaccggtcgacatgaaaggcgagatcggtgaagaagagcgttgggcgattcaccgcgcagcaccttcctacgaagagctgtcaaactctcaggaactgctggaaaccggtatcaaagttatcgacctgatgtgtccgttcgctaagggcggtaaagttggtctgttcggtggtgcgggtgtaggtaaaaccgtaaacatgatggagctcattcgtaacatcgcgatcgagcactccggttactctgtgtttgcgggcgtaggtgaacgtactcgtgaggggaacgacttctaccacgaaatgaccgactccaacgttatcgataaagtatccctggtgtatggccagatgaacgagccgccgggaaaccgtctgcgcgtagctctgaccggtctgaccatggctgagaaattccgtgacgaaggtcgtgacgttctgctgttcgttgacaacatctatcgttacaccctggccggtacggaagtatccgcactgctgggccgtatgccttcagcggtaggttatcagccgaccctggcggaagagatgggcgttctgcaggaacgtatcacctccaccaaaaccggttctatcacctccgtacaggcagtatacgtacctgcggatgacttgactgacccgtctccggcaaccacctttgcgcaccttgacgcaaccgtggtactgagccgtcagatcgcgtctctgggtatctacccggccgttgacccgctggactccaccagccgtcagctggacccgctggtggttggtcaggaacactacgacaccgcgcgtggcgttcagtccatcctgcaacgttatcaggaactgaaagacatcatcgccatcctgggtatggatgaactgtctgaagaagacaaactggtggtagcgcgtgctcgtaagatccagcgcttcctgtcccagccgttcttcgtggcagaagtattcaccggttctccgggtaaatacgtctccctgaaagacaccatccgtggctttaaaggcatcatggaaggcgaatacgatcacctgccggagcaggcgttctacatggtcggttccatcgaagaagctgtggaaaaagccaaaaaactttaa

SEQ ID NO: 134 - DNA, 1506 bp, Escherichia coli
atggaagcattacttcagcttaaaggcatcgataaagccttcccgggcgtaaaagccctctcgggcgcagcgttaaatgtctatccgggccgcgtgatggcgctggtgggcgaaaacggcgcgggtaaatccaccatgatgaaagtgcttactggcatctatactcgcgatgccggtacgcttttatggctggggaaagaaacgacatttaccgggccgaaatcttcccaggaagccgggattgggattatccatcaggaactgaacctgatcccgcagttaaccattgccgaaaacattttcctcggtcgtgagtttgttaatcgctttggcaaaattgactggaaaaccatgtatgccgaagcggataaattgctggctaaacttaacctgcgctttaaaagcgacaagctggtgggcgatctttccatcggtgaccagcaaatggttgaaatagccaaagtgctgagctttgagtcgaaagtcatcattatggatgaaccgaccgatgcgctgaccgataccgaaaccgaatccctgttccgcgtcatccgcgagctgaaatcgcaaggccgcggtattgtctatatctcccaccgcatgaaagaaatcttcgagagttgcgatgacgttaccgtttttcgtgacggacaatttattgctgagcgcgaagtggcatcactgaccgaagattcgctgattgagatgatggtgggtcgcaagctggaagatcaatatccgcacctggacaaagcgccgggagatatccgcctgaaagtcgataatctctgcggacctggcgttaacgatgtctcttttactttacgcaaaggcgaaattcttggcgtctctggtttgatgggcgcaggtcgtaccgaactgatgaaagtgctctacggcgcactaccgcgcaccagcggttacgtcaccctggatgggcatgaagtcgttacccgttcaccgcaggatggcctggcaaacggcattgtgtatatctccgaagaccgtaaacgtgacggtttagtgttgggcatgtcagtaaaagagaacatgtcgctgacagcgctgcgctacttcagccgcgctggcggcagtttgaagcatgccgatgaacagcaggctgtgagtgattttattcgcctgttcaatgtgaaaacgccgtcgatggagcaggcaattggtctgctttccggtggcaatcagcaaaaagtggcgattgcccgcggtctgatgacacgccccaaagtgttgatccttgatgaacctacccgtggcgtagatgtcggcgcgaaaaaagagatctatcaactgattaaccagttcaaagccgatggcttgagcatcattctggtgtcatcggagatgccagaagtattaggcatgagcgatcgcatcatcgtcatgcatgaagggcatctcagcggggaatttactcgtgagcaggccacccaggaagtgttaatggctgccgctgtgggcaagcttaatcgcgtgaatcaggagtaa

SEQ ID NO: 135 - DNA, 1251 bp, Escherichia coli
atgtcgttggcaaaagcgtccttgtggacggcggccagtacactggtcaagattggtgccgggttactggtcggtaagttgctggcggtgtcatttggtccggcggggcttgggctggcggcaaatttccgccagttgattaccgtgctcggcgtgcttgccggggctggcatctttaacggtgtaaccaaatacgttgcccagtaccatgataatccgcaacagctgcgccgcgtggtcggcacttcatcagcgatggtacttggcttctctacgctgatggcgctggtttttgtgctggcagctgcgccaatcagcttgggattgtttggtaatcacgactatcaggggctggtgcgtttagtggcgctggtgcaaatggggatcgcctggggcaacctgttactggcgttgatgaaaggctttcgcgatgccgcaggtaatgcgttatctctgattgttggcagcttgattggcgttcttgcgtactacgtcagttaccgtttgggcggatatgaaggggcgttgctgggtctggcgttgattcccgcgctggtggtgattcctgccgccgtcatgttaattaagcgtggtgctatcccgttaagctatctgaaacccagctgggataacggtctggcagggcagttgagcaaatttacgctcatgacgttgattacgtcggtgaccttgcctgttgcttacatcatgatgcgtaaactgctggcggcgcagtatagctgggatgaggtggggatctggcaaggggtgagcagtatttccgatgcctacctgcaatttattacggcatcgttcagcgtatatttgctgcccacgttgtcgcggctaacggaaaagcgcgatatcacccgggaagtggttaaatcgctgaaattcgtcttaccggcagtggcggcggcgagttttaccgtctggttgctgcgtgattttgctatctggctgctgttgtcgaataaatttaccgctatgcgcgatctctttgcctggcagttggtgggtgatgtgttaaaagtgggcgcttatgtctttggttatctggtgatcgccaaagcttcactgcggttttatattctggcggaagtcagccagttcactttattgatggtatttgcccactggctaatccctacgcacggcgcgctgggcgcggcacaggcatatatggcaacctatatcgtctatttttctctttgttgtggcgtgtttttactctggcgtaggcgggcatga

SEQ ID NO: 136 - DNA, 762 bp, Escherichia coli
atgtccaagtctgatgtttttcatctcggcctcactaaaaacgatttacaaggggctacgcttgccatcgtccctggcgacccggatcgtgtggaaaagatcgccgcgctgatggataagccggttaagctggcatctcaccgcgaattcactacctggcgtgcagagctggatggtaaacctgttatcgtctgctctaccggtatcggcggcccgtctacctctattgctgttgaagagctggcacagctgggcattcgcaccttcctgcgtatcggtacaacgggcgctattcagccgcatattaatgtgggtgatgtcctggttaccacggcgtctgtccgtctggatggcgcgagcctgcacttcgcaccgctggaattcccggctgtcgctgatttcgaatgtacgactgcgctggttgaagctgcgaaatccattggcgcgacaactcacgttggcgtgacagcttcttctgataccttctacccaggtcaggaacgttacgatacttactctggtcgcgtagttcgtcactttaaaggttctatggaagagtggcaggcgatgggcgtaatgaactatgaaatggaatctgcaaccctgctgaccatgtgtgcaagtcagggcctgcgtgccggtatggtagcgggtgttatcgttaaccgcacccagcaagagatcccgaatgctgagacgatgaaacaaactgaaagccaagcggtgaaaatcgtggtggaagcggcgcgtcgtctgctgtaa

SEQ ID NO: 137 - DNA, 1428 bp, Escherichia coli
gtggatttctcaatcatggtttacgcagttattgcgttggtgggtgtggcaattggctggctgtttgccagttatcaacatgcgcagcaaaaagccgagcaattagctgaacgtgaagagatggtcgcggagttaagcgcggcaaaacaacaaattacccaaagcgagcactggcgtgcagagtgcgagttactcaataacgaagtgcgcagcctgcaaagtattaacacctctctggaggccgatctgcgtgaagtaaccacgcggatggaagccgcacagcaacatgctgacgataaaattcgccagatgattaacagcgagcagcgcctcagtgagcagtttgaaaacctcgccaaccgtatttttgagcacagcaatcgccgggttgatgagcaaaaccgtcagagtctgaacagcctgttgtcgccgctacgtgaacaactggacggtttccgccgtcaggttcaggacagcttcggtaaagaagcacaagaacgccataccctgacccacgaaattcgcaatctccagcaactcaacgcgcaaatggcccaggaagcgatcaacctgacgcgcgcgctgaaaggcgacaataaaacccagggcaactggggcgaggtagtattgacgcgggtgctggaggcttccggtctgcgtgaagggtatgaatatgaaacccaggtcagcatcgaaaatgacgcccgctcgcggatgcagccggatgtcatcgtgcggctgccgcagggaaaagatgtggtgatcgacgccaaaatgacgctggtcgcctatgaacgctattttaacgccgaagacgactacacccgcgaaagcgcgctacaggaacatatcgcgtcggtgcgtaaccatatccgtttgctgggacgcaaagattatcaacagctgccggggctgcgaactctggattacgtgctgatgtttattcccgttgaacccgcttttttactggcgcttgaccgccagccggagctgatcaccgaagcgttgaaaaacaatatcatgctggttagcccgactacgctgctggtggcgctgcgcactatcgccaacctgtggcgttatgagcatcaaagccgcaacgcccagcaaatcgccgatcgtgccagcaagctgtacgacaagatgcgtttgttcatcgatgacatgtccgcgattggtcaaagtctcgacaaagcgcaggataactatcggcaggcaatgaaaaaactctcttcagggcgcggaaatgtgctggcgcaggcagaagcgtttcgcggtttaggagtagaaattaaacgcgagattaatccggatttggctgaacaggcggtgagccaggatgaagagtatcgacttcggtcggttccggagcagccgaatgatgaagcttatcaacgcgatgatgaatataatcagcagtcgcgctag

SEQ ID NO: 138 - DNA, 1473 bp, Escherichia coli
gtggatattcaaagttttgctgttttatcagggaatatttatatgatacgtaagtcagctacaggtgttattgttgcgttagccgtaatctggggtggtggcacatggtacacaggtacgcaaattcagcctggtgtcgaaaaatttattaaagattttaacgatgctaaaaagaaaggtgaacatgcctacgatatgacgttaagttatcaaaattttgacaaaggcttttttaattcccgttttcaaatgcaaatgacattcgataacggtgcacccgatctcaatatcaagccaggccagaaagttgtatttgatgtggatgttgagcacggtccgttgcccatcacaatgttaatgcatggtaatgtcatcccagcactggcagcggcaaaagtgaacttagtgaataatgaactgacacaaccgctatttatcgccgcgaaaaataaatcgcccgtggaagcgacattgcgattcgcgtttggtggctcattctctacgacattagatgttgcccctgcagagtatggaaagttttcttttggtgagggccagtttacttttaatggtgatagtagttcattgtctaacctggatattgaaggcaaagtcgaagatattgttctgcaattatcaccaatgaacaaagtaacggcaaaaagttttaccattgattctctggcgcgattagaagaaaagaaatttccggttggtgaaagcgagtcgaaatttaatcagattaacattatcaatcacggggaagacgttgcccaaatcgatgctttcgttgcaaaaaccaggctggatcgcgttaaagacaaagattatatcaatgtcaatctgacctacgaacttgataagttaacaaaagggaatcagcaactcggtagtggtgagtggtcattgattgctgaatctattgatccctcagcggtgcgccaatttatcatccagtataacattgcgatgcagaagcagcttgctgcacaccctgaattagcaaacgatgaagttgctctgcaagaagtgaatgctgcattgttcaaagagtatttaccgttattacaacaaagtgagccgaccattaaacaaccggtaagatggaagaacgcactcggcgaactaaatgccaatctggatatcagtattgccgacccagccaaatcttcatcatccacaaacaaagatatcaaatcgctcaattttgatgtgaagttaccgcttaatgtcgtcacagaaaccgcaaaacagcttaatttatctgaaggaatggatgcggaaaaagcgcaaaagcaggctgataaacaaatcagcgggatgatgacattaggtcagatgtttcagttaatcacgattgacaacaataccgcctcgctgcagctgcgttatacaccgggtaaagttgtttttaacggacaggagatgagcgaagaagaatttatgtctcgtgccggacgttttgttcattaa

SEQ ID NO: 139 - DNA, 960 bp, Escherichia coli
gtggcacaacgagattatgtacgccgcagccaaccggcaccttcgcggcgaaaaaagagcacctcacggaaaaagcaacgaaatctgcctgcggtttctcccgctatggtcgctattgctgccgccgttcttgtgacctttatcggtggtctgtacttcattacgcatcacaagaaagaagagtccgagacgctgcaaagccagaaagtgaccggaaacggactaccaccaaaaccagaagaacgctggcgctacatcaaagagctggaaagtcgccagccgggtgtgcgtgcgcccacagaaccttctgccggtggtgaagtgaaaacgccggagcaactgacaccagaacaacgtcagcttcttgaacaaatgcaggctgatatgcgccagcagccaacgcagctggttgaagttccgtggaatgaacagacgccggaacagcgtcagcaaacgctacagcgccaacgtcaggcgcagcaattagcggaacagcaacgcctggctcagcagtcgcgtacgactgaacaaagctggcagcagcagacgcgtacgtcgcaagccgcgccggtacaggcgcaaccgcgccagtctaaaccggcttctactcagcagccgtaccaggatctgctgcaaacccctgcgcacacgaccgcgcagtcgaagccgcagcaagctgcgccggttactcgtgccgctgacgcgccaaaaccgacggcggagaaaaaagacgaacgccgctggatggtgcagtgcggttcgttcagaggcgcggaacaggcagagacggtacgtgctcagctggcgttcgaaggctttgactcaaaaattaccaccaacaatggctggaatcgtgtggtcattggcccggtgaaaggcaaagagaacgcagacagcaccctcaatcggttgaagatggcgggtcatacaaactgcattcggctcgccgccgggggttga

SEQ ID NO: 140 - DNA, 951 bp, Escherichia coli
atgagtataaaagagcaaacgttaatgacgccttacctacagtttgaccgcaaccagtgggcagctctgcgtgattccgtacctatgacgttatcggaagatgagatcgcccgtctcaaaggtattaatgaagatctctcgttagaagaagttgccgagatctatttacctctgtcacgtttgctgaacttctatataagctcgaatctgcgccgtcaggcagttctggaacagtttcttggtaccaacgggcaacgcattccttacattatcagtattgctggtagtgtcgcggtggggaaaagtacaaccgcccgtgtattgcaggcactattaagccgttggccggaacatcgtcgtgttgaactgatcactacagatggcttccttcaccctaatcaggttctgaaagaacgtggtctgatgaagaagaaaggcttcccggaatcgtatgatatgcatcgcctggtgaagtttgtttccgatctcaagtccggcgtgccaaacgttacagcccctgtttactcgcatcttatttatgatgtgatcccggatggagataaaactgttgttcagcctgatattttaattcttgaagggttaaatgtcttacagagcgggatggattatccacacgatccacatcatgtatttgtttctgattttgtcgatttttcgatatatgttgatgcaccggaagacttacttcagacatggtatatcaaccgttttctgaaattccgcgaaggggcttttacagacccggattcctattttcataactacgcgaaattaactaaagaagaagctattaagactgccatgacgttgtggaaagagatcaactggctgaacttaaagcaaaatattctacctactcgcgagcgcgccagtttaatcctgacgaaaagtgctaatcatgcggtagaagaggtcagactacgcaaataa

SEQ ID NO: 141 - DNA, 4029 bp, Escherichia coli
atggtttactcctataccgagaaaaaacgtattcgtaaggattttggtaaacgtccacaagttctggatgtaccttatctcctttctatccagcttgactcgtttcagaaatttatcgagcaagatcctgaagggcagtatggtctggaagctgctttccgttccgtattcccgattcagagctacagcggtaattccgagctgcaatacgtcagctaccgccttggcgaaccggtgtttgacgtccaggaatgtcaaatccgtggcgtgacctattccgcaccgctgcgcgttaaactgcgtctggtgatctatgagcgcgaagcgccggaaggcaccgtaaaagacattaaagaacaagaagtctacatgggcgaaattccgctcatgacagacaacggtacctttgttatcaacggtactgagcgtgttatcgtttcccagctgcaccgtagtccgggcgtcttctttgactccgacaaaggtaaaacccactcttcgggtaaagtgctgtataacgcgcgcatcatcccttaccgtggttcctggctggacttcgaattcgatccgaaggacaacctgttcgtacgtatcgaccgtcgccgtaaactgcctgcgaccatcattctgcgtgccctgaactacaccacagagcagatcctcgacctgttctttgaaaaagttatctttgaaatccgtgataacaagctgcagatggaactggtgccggaacgcctgcgtggtgaaaccgcatcctttgacatcgaagctaacggtaaagtgtacgtagaaaaaggccgccgtatcactgcgcgccacattcgccagctggaaaaagacgacgtcaaactgatcgaagtcccggttgagtacatcgcaggtaaagtggttgctaaagactatattgatgagtctaccggcgagctgatctgcgcagcgaacatggagctgagcctggatctgctggctaagctgagccagtctggtcacaagcgtatcgaaacgctgttcaccaatgatctggatcacggcccgtatatctctgaaaccttacgtgtcgacccaactaacgaccgtctgagcgcactggtagaaatctaccgcatgatgcgccctggcgagccgccgactcgtgaagcagcggaaagcctgttcgagaacctgttcttctccgaagaccgttatgacctgtctgcggttggtcgtatgaagttcaaccgttctctgctgcgcgaagaaatcgaaggttctggtatcctgagcaaagacgacatcattgatgttatgaaaaagctcatcgatatccgtaacggtaaaggcgaagtcgatgatatcgaccacctcggcaaccgtcgtatccgttccgttggcgaaatggcggaaaaccagttccgcgttggcctggtacgtgtagagcgtgcggtgaaagagcgtctgtctctgggcgatctggataccctgatgcctcaggatatgatcaacgccaagccgatttccgcagcagtgaaagagttcttcggttccagccagctgtctcagtttatggaccagaacaacccgctgtctgagattacgcacaaacgtcgtatctccgcactcggcccaggcggtctgacccgtgaacgtgcaggcttcgaagttcgagacgtacacccgactcactacggtcgcgtatgtccaatcgaaacccctgaaggtccgaacatcggtctgatcaactctctgtccgtgtacgcacagactaacgaatacggcttccttgagactccgtatcgtaaagtgactgacggtgttgtaactgacgaaattcactacctgtctgctatcgaagaaggcaactacgttatcgcccaggcgaactccaacctggatgaagaaggccacttcgtagaagacctggtaacctgccgtagcaaaggcgaatccagcttgttcagccgtgaccaggttgactacatggacgtatccacccagcaggtggtatccgtcggtgcgtccctgatcccgttcctggaacacgatgacgccaaccgtgcattgatgggtgcgaacatgcaacgtcaggccgttccgactctgcgtgctgataagccgctggttggtactggtatggaacgtgctgttgccgttgactccggtgtaactgcggttgctaaacgtggtggtgtcgttcagtacgtggatgcttcccgtatcgttatcaaagttaacgaagacgagatgtatccgggtgaagcaggtatcgacatctacaacctgaccaaatacacccgttctaaccagaacacctgtattaaccagatgccgtgtgtgtctctgggtgaaccggttgaacgtggcgacgtgctggcagacggtccgtccaccgacctcggtgaactggcgcttggtcagaacatgcgcgtagcgttcatgccgtggaatggttacaacttcgaagactccatcctcgtatccgagcgtgttgttcaggaagaccgtttcaccaccatccacattcaggaactggcgtgtgtgtcccgtgacaccaagctggggccagaagagatcaccgctgacatcccgaacgtgggtgaagctgcgctctccaaactggatgaatccggtatcgtttatattggtgcggaagtgaccggtggcgacattctggttggtaaggttacgccgaaaggtgaaactcagctgaccccagaagaaaaactgctgcgtgcgatcttcggtgagaaagcgtctgacgttaaagactcttctctgcgcgtaccaaacggtgtatccggtacggttatcgacgttcaggtctttactcgcgatggcgtagaaaaagacaaacgtgcgctggaaatcgaagaaatgcagctcaaacaggcgaagaaagacctgtctgaagaactgcagatcctcgaagcgggtctgttcagccgtatccgtgctgtgctggtagccggtggcgttgaagctgagaagctcgacaaattgccgcgcgatcgctggctggagctgggcctgaccgacgaagagaaacaaaatcagctggaacagctggctgagcagtatgacgaactgaaacacgagttcgagaagaaactcgaagcgaaacgccgcaaaatcacccagggcgacgatctggcaccgggcgtgctgaagattgttaaggtatatctggcggttaaacgccgtatccagcctggtgacaagatggcaggtcgtcacggtaacaagggtgtaatttctaagatcaacccgatcgaagatatgccttacgatgaaaacggtacgccggtagacatcgtactgaacccgctgggcgtaccgtctcgtatgaacatcggtcagatcctcgaaacccacttgggtatggctgcgaaaggtatcggcgacaagatcaacgccatgctgaaacagcagcaggaagtcgcgaaactgcgtgaattcatccagcgtgcgtacgatctgggcgctgacgttcgtcagaaagttgacctgagtaccttcagcgatgaagaagttatgcgtctggctgaaaacctgcgcaaaggtatgccaatcgcaacgccggtgttcgacggtgcgaaagaagcagaaattaaagagctgctgaaacttggcgacctgccgacttctggtcagatccgcctgtacgacggccgcactggtgaacagttcgaacgtccggtaaccgttggttacatgtacatgctgaaactgaaccacctggtcgacgacaagatgcacgcgcgttccaccggttcttacagcctggttactcagcagccgctgggtggtaaggcacagttcggtggtcagcgtttcggggagatggaagtgtgggcgctggaagcatacggcgcagcatacaccctgcaggaaatgctcaccgttaagtctgatgacgtgaacggtcgtactaagatgtataaaaacatcgtggacggcaaccatcagatggagccgggcatgccagaatccttcaacgtattgttgaaagagattcgttcgctgggtatcaacatcgaactggaagacgagtaa

SEQ ID NO: 142 - DNA, 846 bp, Escherichia coli
gtgagcagtggacgcaacatatcgtgcaggatggcgaccagatcctactttttcaggttattgcagggggttgagatgttacgtattgcggacaaaacgtttgattcacatctgtttaccggcaccgggaaattcgcctcttcacaactgatggtagaggcaatccgcgcttccggcagccagctggtgacgctggcgatgaaacgtgtcgacttgcgccagcacaacgacgctatcctcgaaccgcttatcgcggcgggtgtgaccctgctgccaaatacatccggggcgaaaacagcggaagaagccattttcgccgcccatctggctcgtgaagcgttaggcacaaactggttaaaattggagattcaccctgacgcccgctggctgttgcccgatcccatcgaaaccctgaaagccgccgaaacgctggtacaacagggatttgtcgtgctgccttactgcggggccgatccggtattgtgtaaacgtctggaagaagtcggctgtgcagcggtgatgccgctcggcgcgccgattggctcgaatcaggggctggaaacccgcgccatgctggagattattatccagcaggccacagttccggtggttgtcgatgctggcatcggcgttcccagccatgccgcgcaggcgctggaaatgggggccgacgcggtgttagtgaatacggcgattgccgtcgcggacgatcccgtcaacatggcgaaggcatttcgtctggcagtagaagcaggcctgctggcacctcagtccggaccgggcagccgcagttattttgctcatgccaccagcccgctgaccggatttctggaggcatcggtatga

SEQ ID NO: 143 - DNA, 2097 bp, Escherichia coli
atgaaaaaaagacatctgcttagcttactggcgctgggcattagcacagcttgctacggcgaaacatatcctgcgcccattggtccgtcgcagtcggatttcggtggcgtaggattattacaaacgcccacggctcgcatggcgcgggaaggggagttgagtctgaactatcgcgataacgatcagtaccgttattactcagcttcagtgcaactcttcccgtggctggaaacaacgctgcgctacaccgacgtgcgcacccggcagtacagcagcgtcgaagcgttctctggcgatcaaacgtataaagataaagccttcgatctcaaactgcgtttgtgggaagagagttactggctgccgcaagtggcggttggtgcgcgggatatcggcggtacggggctgtttgatgcggaatatcttgttgccagcaaagcctgggggccgttcgattttacgcttggcctgggctggggatatttgggcacaagcggtaatgtgaaaaatccgctctgttcagccagtgataaatattgctatcgcgataacagctacaaacaggcgggatctatcgacggtagccagatgttccacggtcctgcctcactgtttggcggcgtggaataccagacgccctggcaaccgctgcgcctgaaactggagtatgaaggcaataattatcagcaggattttgccggtaagctggagcaaaaaagtaagtttaacgtcggggcgatttatcgcgttaccgattgggccgacgttaaccttagctatgaacgtgccaacacctttatgtttggcgtcacgctgcgcaccaactttaacgatctgcgcccgtcttacaacgataacgcccgcccgcaatatcaaccgcagccgcaggatgccattttgcagcattcggtggtggcgaatcagttaacgctgttgaaatacaatgccggacttgccgatccgcagatccaggcgaaaggcgatacgctgtatgttaccggcgagcaggtgaaatatcgtgattcgcgcgaagggatcgttcgtgctaatcggatcgtgatgaatgatctgccggatgggatcaagacgatccgcgttacggaaaatcgccttaacatgccgcaggtgacgacggaaacggatgtcgccagcctgaaaaatcatctcgccggagagccgttgggccacgaaacgaagctggcgcaaaaacgcgtcgagccagtggttccgaagtccaccgagcagggctggtatatcgacaaatcgcgctttgatttccatatcgatccggtgctgaaccagtcggtcggtggcccggaaaacttttacatgtatcagctgggcgtgatgggaacggcagatttgtggctgacggaccatctgctgaccaccggcagcctgtttgcaaatcttgccaacaactacgacaagtttaactacaccaatccgccgcaggactcgcacttaccgcgcgtgcgtacccatgtgcgcgagtatgtgcagaacgatgtctatgtgaataacctgcaagccaactacttccagcatctgggcaacggcttctacggtcaggtctacggaggttatctcgaaaccatgtttggcggtgcgggggcagaagtgttgtatcgcccgctggacagcaactgggcgtttggtctggatgccaactacgttaaacagcgcgactggcgtagtgcaaaggatatgatgaaattcaccgactacagcgtgaaaaccggacatctgaccgcctactggacgccatctttcgctcaggatgtgttagttaaagccagcgtcgggcagtatctggcaggggataaaggcggcacgctggagatcgctaaacgctttgacagcggcgtggtggtgggcggctatgccacgatcaccaacgtttcgaaagaggagtacggcgaaggggacttcaccaaaggcgtgtatgtctctgtaccgttggatctcttctcgtctggcccgacacgcagccgtgcggcgattggctggacgccgctgacgcgtgacggtggtcagcaacttgggcgtaagttccagttgtatgacatgaccagcgaccgtagcgtcaatttccgctaa

SEQ ID NO: 144 - DNA, 609 bp, Escherichia coli
atgaaagcgttaacggccaggcaacaagaggtgtttgatctcatccgtgatcacatcagccagacaggtatgccgccgacgcgtgcggaaatcgcgcagcgtttggggttccgttccccaaacgcggctgaagaacatctgaaggcgctggcacgcaaaggcgtaattgaaattgtttccggcgcatcacgcgggattcgtctgttgcaggaagaggaagaagggttgccactggtaggtcgtgtggctgccggtgaaccgcttctggcgcaacagcatattgaaggtcattatcaggtcgatccttccttgttcaagccgaatgctgatttcctgctgcgcgtcagcgggatgtcgatgaaagatatcggcattatggatggcgacttgctggcagtgcataaaactcaggatgtacgtaacggtcaggtcgttgtcgcacgtattgatgacgaagttaccgttaagcgcctgaaaaaacagggcaataaagtcgaactgttgccagaaaatagcgagtttaaaccaattgtcgttgaccttcgtcagcagagcttcaccattgaagggctggcggttggcgttattcgcaacggcgactggctgtaa

SEQ ID NO: 145 - DNA, 2148 bp, Escherichia coli
atgaaaaaagtcgtcacggtttgcccctattgcgcatcaggttgcaaaatcaacctggtcgtcgataacggcaaaatcgtccgggcggaggcagcgcaggggaaaaccaaccagggtaccctgtgtctgaagggttattatggctgggacttcattaacgatacccagatcctgaccccgcgcctgaaaacccccatgatccgtcgccagcgtggcggcaaactcgaacctgtttcctgggatgaggcactgaattacgttgccgagcgcctgagcgccatcaaagagaagtacggtccggatgccatccagacgaccggctcctcgcgtggtacgggtaacgaaaccaactatgtaatgcaaaaatttgcgcgcgccgttattggtaccaataacgttgactgctgcgctcgtgtctgacacggcccatcggttgcaggtctgcaccaatcggtcggtaatggcgcaatgagcaatgctattaacgaaattgataataccgatttagtgttcgttttcgggtacaacccggcggattcccacccaatcgtggcgaatcacgtaattaacgctaaacgtaacggggcgaaaattatcgtctgcgatccgcgcaaaattgaaaccgcgcgcattgctgacatgcacattgcactgaaaaacggctcgaacatcgcgctgttgaatgcgatgggccatgtcattattgaagaaaatctgtacgacaaagcattcgtcgcttcccgtacagaaggctttgaagagtatcgtaaaatcgttgaaggctacacgccggagtcggttgaagatatcaccggcgtcagcgccagtgagattcgtcaggcggcacggatgtatgcccaggcgaaaagcgccgccatcctgtggggcatgggtgtaacccagttctaccagggcgtggaaaccgtgcgttctctgaccagcctcgcgatgctgaccggtaacctcggtaagccacatgcgggtgttaacccggttcgtggtcagaacaacgtgcagggtgcctgcgatatgggcgcgctgccggatacgtatccgggataccagtacgtaaaagatccggctaaccgcgagaaattcgccaaagcctggggcgtggaaagcctgcctgctcataccggttatcgcatcagcgagctgccgcaccgcgcagcgcatggcgaagtgcgtgccgcgtacattatgggcgaagatccgctacaaactgacgcggagctgtcggcagtacgtaaagcctttgaagatctggaactggttatcgttcaggacatctttatgaccaaaaccgcgtcggcggcggatgttattttaccgtcaacgtcgtggggcgagcatgaaggcgtgtttactgcggctgaccgtggcttccagcgtttcttcaaagcagttgaaccgaaatgggatctgaaaacggactggcaaatcatcagtgaaatcgccacccgtatgggttatccgatgcactacaacaacacccaggagatctgggatgagttgcgtcatctgtgcccggatttctacggtgcgacttacgagaaaatgggcgaactgggcttcattcagtggccttgccgcgatacttcagatgccgatcaggggacttcttatctgtttaaagagaagtttgacaccccgaacggtctggcgcagttcttcacctgcgactgggtagcgccaatcgacaaactcaccgacgagtacccgatggtactgtcaacggtgcgtgaagttggtcactactcttgccgttcgatgaccggtaactgtgcggcactggcggcgctggctgatgaacctggctacgcacaaatcaataccgaagacgccaaacgtctgagtattgaagatgaggcattggtttgggtgcactcgcgtaaaggcaaaattatcacccgtgcgcaggtcagcgatcgtccgaacaaaggggcgatttacatgacctaccagtggtggattggtgcctgtaacgagctggttaccgaaaacttaagcccgattacgaaaacgccggaatacaaatactgcgccgtgcgcgtcgagccgatcgccgatcagcgcgccgccgagcagtacgtgattgacgagtacaacaagttgaaaactcgcctgcgcgaagcggcactggcgtaa

SEQ ID NO: 146 - DNA, 681 bp, Escherichia coli
atgattaacgtacaaaacgtcagtaaaaccttcatcctgcaccagcaaaacggcgtgcgcttgcccgtcctcaaccgcgcctcgctcaccgtcaacgcgggcgaatgcgtggtgctccacggccactccggcagcggcaaatcaaccctgctgcgctcgctgtacgccaactatctgcccgatgaagggcaaatccagatcaaacacggtgacgagtgggtagacctggtcactgcgccagcgcgcaaagtggtggaaatccgcaaaaccaccgttggctgggtgagccagtttctgcgcgttatcccgcgcatttcggcgctggaagtagtaatgcagccgctgctcgataccggcgtaccgcgtgaagcctgcgccgctaaagccgcgcgtctgctcacccgtctgaacgtgccggaacgcctgtggcgccttgcgccatcgaccttctccggcggcgaacagcagcgcgtcaacatcgcccgtggctttatcgtcgactaccccattctgctgctcgacgaacctaccgcctcgctggacgccaaaaacagcgccgccgtagtcgaactgatccgagaagccaaagcccgcggcgcagccatcgtcggcattttccatgacgaagccgtacgtaatgacgtcgccgaccgcctgcacccaatgggagcctcttcatga

SEQ ID NO: 147 - DNA, 1017 bp, Escherichia coli
atgaacgctaagataattgcctcgctggccttcaccagcatgttcagcctcagcaccctgttaagcccggcacacgccgaagagcaggaaaaggcgctgaatttcggcattatttcaacggaatcacagcaaaacctgaaaccgcaatggacgccgtttttacaggatatggagaagaagctgggcgtgaaggtcaacgccttctttgccccggactatgcgggcattatccagggaatgcgtttcaacaaagtggatatcgcctggtacggcaacctgtcggcgatggaagcagtggatcgcgccaacggccaagtcttcgctcagaccgtcgcggcggatggatcgccgggttactggagcgtgttgatcgtcaacaaagacagcccgatcaacaacctgaacgatctgctggcgaagcggaaagatctcaccttcggtaatggcgatcctaactccacctctggcttcctcgtccccggctactacgtcttctccaaaaacaatatctccgccagtgacttcaagcgcaccgtcaacgccgggcatgaaaccaacgcgctggccgtcgccaacaagcaggtggatgtggcgaccaacaacaccgaaaacctcgacaagctgaaaacctccgcgccggagaagctgaaagaactgaaagtgatctggaagtcaccgctgatcccaggcgatccgatcgtctggcgtaaaaacctttccgaaaccaccaaagacaagatctacgacttctttatgaattacggcaagacgccggaagagaaagcggtgctggaacgcctgggctgggcgccgttccgcgcctccagcgacctgcaactggtgccgattcgccagctcgcactgtttaaagagatgcaaagcgtgaaaggcaataaagggctgaatgagcaggacaagctggcaaaaaccaccgagattcaagcgcagctggatgacctggaccgcctgaacaacgcgttaagcgcgatgagttcggtaagtaaagcgatgcagtaa

SEQ ID NO: 148 - DNA, 2229 bp, Escherichia coli
atgtacacacagaccctgtatgagttaagtcaggaggctgaacggctgttacagctttctcgccaacagttgcagttactggaaaaaatgcctctctctgtacccggagacgatgcgccacaactggctttaccctggagtcagcctaatatcgccgagcgtcacgcgatgctgaataatgagttgcgtaaaatttcccgactggaaatggtgctggcgattgtcggtaccatgaaagcagggaaatcaaccaccattaatgccattgttggtacggaggtactgcctaatcgcaatcgcccaatgactgcgctgccgacgcttattcgccatacgcccggccaaaaggaaccggtactgcatttttcacatgtcgcgccaatcgattgtttaattcaaaaattacaacagcgcctgcgtgattgcgatattaagcatctgaccgatgtgctggaaatagataaagatatgcgtgcgcttatgcagcggatcgaaaatggcgtcgctttcgaaaaatattatctgggtgcccagcctatttttcattgtctgaaaagtttgaatgatttggtgcgactggcgaaggcgctggacgtcgattttcctttttctgcttacgccgccattgagcatattcccgtgattgaagtggagtttgtccatctggcggggctggaaagttatcccggtcaattgacgttactggatacccccgggccaaatgaagccgggcaaccgcatctgcaaaaaatgcttaaccagcagctggcacgcgcctcggcggtactggcggtgctggattatacgcaactgaaatcgatctccgatgaagaggtccgtgaggcgattttggcggtggggcaatcggtgccgctgtatgtgctggtcaataagttcgatcaacaggatcgtaacagtgacgacgccgaccaggtgcgggcactgatttccgggacgctgatgaaaggctgtattacgccacagcagatatttccggtgtcgtcgatgtggggctacctggcaaatcgggcgcgccatgagttagccaacaacggtaagttaccaccgccagagcaacaacgctgggtggaagattttgcccatgccgcgctcggcaggcgctggcgtcatgccgatctggcggacctcgaacatattcgtcatgctgccgatcagttgtgggaagattcgctgttcgcccagccaattcagatgttgcttcatgccgcttacgctaacgcctcgttgtatgctctgcgatctgccgcgcataaactgttgaattacgcgcagcaggcgcgggaatacctggattttcgtgcgcacgggttaaacgtcgcttgtgaacaattgcggcaaaatatccaccagatcgaagaaagtttgcagctattgcaactcaatcaggcgcaggtgagcggcgagattaaacatgaaatcgagctggccctgacctccgccaaccactttctgcgtcaacagcaagatgcgctgaaggtgcagttagccgccttgtttcaggatgattcggagccgttaagcgagattcgtacccgctgtgagacactgttacagacggcgcagaacaccatcagtcgcgactttacgctgcgttttgccgagcttgaatccaccctttgccgggtgttaaccgatgttattcgccccattgagcaacaagtcaaaatggaattgagcgagtcagggtttcgtcctgggtttcattttcctgtttttcacggcgtagttccccacttcaacactcgccagctgttcagtgaagtcatttcgcgccaggaagcaacggacgagcagagcacgcgattaggcgttgtgcgtgagactttttcgcgctggttgaatcagcctgactggggacggggaaatgagaaatccccgacagaaacggttgattacagtgtgttgcaacgagcattaagcgcagaagtcgatctttattgccaacaaatggctaaagttctggcagagcaggtcgatgaatctgttacggcaggcatgaatacttttttcgctgagttcgcttcatgtttgacggaattacagacgcgtttacgcgaaagtctggctctgcgtcaacaaaatgaatcggtggtcaggctgatgcaacagcaattgcagcagactgtgatgactcacggctggatttacaccgacgctcagctgttacgcgatgatattcaaacacttttcacggcagaacgatattga

SEQ ID NO: 149 - DNA, 951 bp, Escherichia coli
atgagtgatatcagtaaggcgagcctgcctaaggcgatttttttgatggggccgacggcctccggtaaaacggcgttagccattgagctgcgtaaaattttaccagtagagttgataagcgttgattctgcccttatttacaaagggatggatatcgggacggcgaagccgaacgctgaagagttactcgccgcgccgcaccgattgctggatattcgcgatccgtcgcaggcttactcggctgctgattttcgccgcgatgcgctggcggaaatggccgatatcaccgcggcggggcggatcccactgttagtgggcggtacgatgttgtatttcaaggcattgctggaagggttgtcgccgctaccgtcggcagacccggaagtacgggccagaattgagcaacaggcggcagagcaaggttgggagtcattgcatcgtcaacttcaggagatcgatccggttgcggcagcaaggattcatccaaatgatccacaaaggctttcccgggcactggaagtttttttcatttcgggtaaaactttaacggaactgacgcaaacgtcaggagacgctctaccgtatcaggtgcatcagttcgccatcgccccggcgagccgtgaactgctccatcaacgaattgagcagcgttttcatcagatgttggcttcaggttttgaagcagaagtccgggcgctttttgcccgaggagatttgcatacggacttgccttccattcgttgcgtgggttatcgccagatgtggtcttaccttggaggcgaaatctcatacgatgaaatggtttatcgaggtgtttgcgccacgagacagttggcgaagcggcagataacctggctgcgtggttgggaaggggttcactggcttgacagtgaaaaaccagaacaggcgcgtgacgaagtattacaggttgttggtgctatcgcaggctga

SEQ ID NO: 150 - DNA, 1299 bp, Escherichia coli
atgggtaacaacgtcgtcgtactgggcacccaatggggtgacgaaggtaaaggtaagatcgtcgatcttctgactgaacgggctaaatatgttgtacgctaccagggcggtcacaacgcaggccatactctcgtaatcaacggtgaaaaaaccgttctccatcttattccatcaggtattctccgcgagaatgtaactagcatcatcggtaacggtgttgtgctgtctccggccgcgctgatgaaagagatgaaagaactggaagaccgtggcatccccgttcgtgagcgtctgctgctgtctgaagcatgtccgctgatccttgattatcatgttgcgctggataacgcgcgtgagaaagcgcgtggcgcgaaagcgatcggcaccaccggtcgtggtatcgggcctgcttatgaagataaagtggcacgtcgcggtctgcgtgttggcgaccttttcgacaaagaaaccttcgctgaaaaactgaaagaagtgatggaatatcacaacttccagttggttaactactacaaagctgaagcggttgattaccagaaagttctggatgatacgatggctgttgccgacatcctgacttctatggtggttgacgtttctgacctgctcgaccaggcgcgtcagcgtggcgatttcgtcatgttcgaaggtgcgcagggtacgctgctggatatcgaccacggtacttatccgtacgtaacttcttccaacaccactgctggtggcgtggcgaccggttccggcctgggcccgcgttatgttgattacgttctgggtatcctcaaagcttactccactcgtgtgggtgcaggtccgttcccgactgaactgtttgatgaaactggcgagttcctctgcaagcagggtaacgaattcggcgcaactacgggtcgtcgtcgtcgtaccggctggctggacaccgttgccgttcgtcgtgcggtacagctgaactccctgtctggcttctgcctgactaaactggacgttctggatggcctgaaagaggtgaaactctgtgtggcttaccgtatgccggatggtcgtgaagtgactaccactccgctggcagctgacgactggaaaggtgtagagccgatttacgaaaccatgccgggctggtctgaatccaccttcggcgtgaaagatcgtagcggcctgccgcaggcggcgctgaactacatcaagcgcattgaagagctgaccggtgtaccgatcgatatcatctctaccggtccggatcgtactgaaaccatgattctgcgcgacccgttcgacgcgtaa

SEQ ID NO: 151 - DNA, 1944 bp, Escherichia coli
atgattaagtttagcgcaacgctcctggccacgctgattgccgccagtgtgaatgcagcgacggtcgatctgcgtatcatggaaaccactgatctgcatagcaacatgatggatttcgattattacaaagacaccgccacggaaaaattcggactggtacgtacggcaagcctgattaacaatgcccgcaatgaagtgaaaaacagcgtactggtcgataacggcgatttgattcaggggagtccgctggccgattacatgtcggcgaaaggattaaaagcaggtgatattcacccggtctataaggcattaaatacgctggactataccgtcggaacgcttggcaaccacgagtttaactacggtctggattacctgaaaaatgcgctggcaggagcgaaattcccttatgtaaatgccaacgtcattgacgccagaaccaaacagccaatgtttacaccgtatttaattaaagacaccgaagtggtcgataaagacggaaaaaaacagacgctgaagattggctatattggcgtcgtgccgccgcaaatcatgggctgggataaagctaatttatccggaaaagtgacggtgaatgatattaccgaaaccgtgcgcaaatacgagcctgaaatgcgcgagaaaggtgccgatgtcgttgtcgttctggcgcattccgggctgtctgccgatccgtataaagtaatggcggaaaactcagtttattacctcagtgaaattccgggcgttaacgccattatgtttggccatgctcacgccgttttcccgggtaaagattttgctgatatcgaaggggctgatatcaccaaaggcacgctgaatggtgttccggcggtaatgccgggcatgtggggcgatcatcttggggtggtcgacttacaactcagtaatgacagcggtaaatggcaggtgacgcaggcgaaagcggaagcacggccgatttacgacatcgccaataaaaaatccctcgcggcggaagacagcaagctggtagaaacactcaaagccgatcacgatgccacacgccagttcgtcagcaagccaatcggtaaatctgccgacaatatgtatagctatctggcgctggtgcaggacgatccgaccgtgcaagtagtgaacaacgcgcaaaaagcgtatgtcgagcattacattcagggcgatccggatctggcaaaactgccggtgctttcagctgccgcaccgtttaaagtcggtggtcgcaaaaatgacccggcaagctatgtggaggtggaaaaaggccagttgaccttccgtaatgccgccgatctttatctctatcccaatacgctgattgtggtgaaagccagcggtaaagaggtgaaagagtggctggagtgctccgccggacagtttaaccagattgatcccaacagcacgaaaccacagtcactcatcaactgggatggtttccgcacttataactttgatgttattgatggtgtgaattatcagattgatgttacccagcccgcccgttatgacggcgagtgccagatgattaatgccaatgcggaaaggattaagaacctgacctttaatggcaagccgattgatccgaacgctatgttcctcgttgccaccaataactatcgcgcttacggcggcaaatttgccgggacgggcgacagccatatcgcttttgcttcaccggatgagaaccgctcggtgctggcagcgtggattgctgatgagtcgaaacgtgcgggggaaattcacccggcggcagataacaactggcgtttagcaccgatagctgccgataagaaactggatatccgtttcgaaacttccccgtcagataaagccgcagcgtttattaaagagaaagggcagtatccgatgaataaagtcgcgaccgatgatatcgggtttgcgatttatcaggtggatttgagtaagtaa

SEQ ID NO: 152 - DNA, 948 bp, Escherichia coli
atgcaaaatcggctgaccatcaaagacatcgcgcgcttaagcggcgtggggaaatctacagtttcccgggtgctgaataacgaaagcggcgtgagccagcgcacccgcgagcgtgttgaagcagtgatgaatcagcatggattttccccttcccgttctgcgcgcgctatgcgtgggcaaagcgataaagtggtcgccatcattgttacccgtctggattcgttgtcagaaaatctcgccgttcaaaccatgctgccagcgttctatgaacaaggttacgacccaatcatgatggaaagtcagttttccccgcaattagttgccgaacatttgggggtgctgaaacggcgtaatatcgacggcgtagtgctgttcggttttactggcataacagaagaaatgttagcccactggcagtcatcgctggttctgctggcgcgtgacgcaaaaggctttgcttcggtctgttatgacgacgaaggggcaatcaagatcctgatgcaacggctgtatgaccaggggcatcgtaatatcagttatctcggcgtgccgcacagtgacgtgacaaccggtaagcgacgtcacgaagcctacctggcgttctgcaaagcgcataaactgcatcccgttgccgccctgccagggcttgctatgaagcaaggctatgagaacgtagcaaaagtgattacgcctgaaactaccgccttactgtgcgcaaccgacacgctggcacttggcgcaagtaaatacctgcaagagcaacgcatcgacaccttgcaactggcgagcgtcggtaatacgccgttaatgaaattccttcatccggagatcgtcaccgtagatcctggttacgccgaagctggacgccaggcggcttgccagttgatcgcgcaggtaaccgaacgcagcgaaccgcaacaaatcatcatccccgccaacctgtcctga

SEQ ID NO: 153 - DNA, 2637 bp, Escherichia coli
atgtcatatctgaatttaagactttaccagcgaaacacacaatgcttgcatattcgtaagcatcgtttggctggtttttttgtccggctctttgtcgcctgtgcttttgccgtacaggcacctttgtcatctgccgaactctattttaatccgcgctttttagcggatgatccccaggctgtggccgatttatcgcgttttgaaaatgggcaagaattaccgccagggacgtatcgcgtcgatatctatttgaataatggttatatggcaacgcgtgatgtcacatttaatacgggcgacagtgaacaagggattgttccctgcctgacacgcgcgcaactcgccagtatggggctgaatacggcttctgtcgccggtatgaatctgctggcggatgatgcctgtgtgccattaaccacaatggtccaggacgctactgcgcatttagatgttggtcagcagcgactgaacctgacgatccctcaggcatttatgagtaatcgcgcgcgtggttatattcctcctgagttatgggatcccggtattaatgccggattgctcaattataatttcagcggaaatagtgtacagaatcggattgggggtaacagccattatgcatatttaaacctacagagtgggttaaatattggtgcgtggcgtttacgcgacaataccacctggagttataacagtagcgacagatcatcaggtagcaaaaataaatggcagcatatcaatacctggcttgagcgagacataataccgttacgttcccggctgacgctgggtgatggttatactcagggtgatattttcgatggtattaactttcgcggcgcacaattggcctcagatgacaatatgttacccgatagccaaagaggatttgccccggtgatccacggtattgctcgtggtactgcacaggtcactattaaacaaaatgggtatgacatttataatagtacggtgccgccggggccttttaccatcaacgatatctatgccgcaggtaatagtggtgacttgcaggtaacgattaaagaggctgacggcagcacgcagatttttaccgtaccctattcgtcagtcccgcttttgcaacgtgaagggcatactcgttattccattacggcaggagaataccgtagtggaaatgcgcaacaggaaaaaccccgctttttccaaagtacattactccacggccttccagctggctggacaatatatggtggaacgcaactggcagatcgttatcgtgcttttaattttggtatcgggaaaaatatgggggcactgggcgctctgtctgtggatatgactcaggctaattccacacttcccgatgacagtcagcatgacggacaatcggtgcgttttctctataacaaatcgctcaatgagtcaggcacgaatattcagttagtgggttaccgttattcgaccagcggatattttaatttcgctgatacaacatacagtcgaatgaatggctacaacatcgaaacacaggacggagttattcaggttaagccgaaattcaccgactattacaacctcgcttataacaaacgcgggaaattacaactcaccgttactcagcaactcgggcgctcatcaacactgtatttgagtggtagccatcaaacttattggggaacgagtaatgtcgatgagcaattccaggctggattaaatactgcgttcgaagatatcaactggacgctcagctatagcctgacgaaaaacgcctggcaaaaaggacgtgatcagatgttagcgcgtaacgtcaatattcctttcagccactggctgcgttctgacagtaaatctcagtggcgacatgccagtgccagctacagcatgtcacacgatctcaacggtcggatgaccaatctggctggtgtatacggtacgttgctggaagacaacaacctcagctatagcgtgcaaaccggctatgccgggggaggcgatggtaatagcggaagcacaggctacgccacgctgaattatcgcggtggttacggcaatgccaatatcggttacagccatagcgatgatattaagcagctctattacggagtcagcggtggggtactggctcatgccaatggcgtaacgctggggcagccgttaaacgatacggtggtgcttgttaaagcgcctggcgcaaaagatgcaaaagtcgaaaaccagacgggggtgcgtaccgactggcgcggttatgccgtgctgccttatgccactgaatatcgggaaaatagagtggcgctggataccaataccctggctgataacgtcgatttagataacgcggtcgctaacgttgttcccactcgtggggcgatcgtgcgagcagagtttaaagcgcgcgttgggataaaactgctcatgacgctaacccacaataataagccgctgccgtttggggcgatggtgacatcagagagtagccagagtagcggcattgttgcggataatggtcaggtttacctcagcggaatgcctctagcgggaaaagttcaggtgaaatggggagaagaggaaaatgctcattgtgtcgccaattatcaactgccaccagagagtcagcagcagttattaacccagctatcagctgaatgtcgttaa

SEQ ID NO: 154 - DNA, 1665 bp, Escherichia coli
atgttaaaacgtatcaagatcgtgaccagcttactgctggttttggccgtttttggccttttacaactgacatcaggcggtctgttctttaatgccttaaagaatgacaaagaaaatttcactgttttacaaaccattcgccagcagcaatccacgctgaatggcagctgggtcgcgttgttgcagacgcgtaacaccctcaaccgcgcgggtatccgctacatgatggatcagaataatattggtagcggttcaaccgttgctgagctgatgcagagtgccagtatttcgttgaaacaggcggaaaaaaactgggcagattacgaagcgttgccgcgtgacccgcgtcagagcaccgccgcagcggcagagatcaaacgtaattacgatatttatcacaatgcgctggcggagctgatccaactgttaggtgcaggcaaaatcaacgagttctttgatcagccgacccagggatatcaggacggtttcgagaagcagtatgtggcttacatggagcaaaacgatcggctctatgatatcgccgtcagcgataacaatgcctcctacagccaggcgatgtggattctggtgggcgtgatgatcgtcgtactggcggtcatcttcgccgtctggttcggtattaaagcctcgctggtagcgccaatgaatcgcctgattgacagcattcgtcatattgcaggcggcgatctggtgaaaccgattgaggtggatggctctaatgagatggggcaactggcagagagtttgcgccatatgcagggagagctgatgcgtaccgtcggtgatgtgcgcaacggggccaatgccatctatagcggtgccagcgaaatcgctaccggcaataacgatctctcttcgcgcaccgagcaacaggccgcttcgctggaagagacggcagccagcatggagcaactcaccgcaacggtgaaacagaacgccgagaatgcgcgccaggccagccacctggcgttaagtgcttctgaaacggcgcaacgcggcggcaaagtggtagataacgtggtgcagactatgcgtgatatctccaccagttcgcagaaaatcgccgatattatcagcgtaattgacggcattgccttccagaccaatattctggctttgaacgcggcggttgaagcagcgcgtgcgggtgagcaaggacgtggttttgcggtggttgcgggagaagtgcgtaatctggcccagcgtagcgcccaggcggctcgtgaaattaaaagcctgattgaagactcggtggggaaagtggatgttggctctacgctggtcgaaagcgccggggaaacaatggcggagattgtcagtgctgtgacccgcgtgacggacattatgggcgaaatagcttctgcttctgatgagcagagccgtggtatcgatcaggttggcttagcggttgctgagatggaccgggtaactcaacagaacgctgcgctggtggaagagtctgccgctgccgccgccgcgttggaagagcaggccagtcgcctgaccgaagctgtggcagtgttccggattcagcaacagcagcaacagcagcgtgaaacatcggctgtggtaaaaaccgtgacgccagctacgccgcgtaaaatggcagtggcagatagcggggagaactgggaaacgttttaa

SEQ ID NO: 155 - DNA, 1965 bp, Escherichia coli
atgtatttacacttagaggatgcgcttgtggaaaaagccaaacaagttacctggcggctgttggctgccggtgtctgtctgctgacggtcagcagcgtggcgcgagccgactcactggatgagcagcgtagtcgttacgcgcaaatcaagcaggcctgggataatcgacaaatggatgtggtcgaacaaatgatgcctggactgaaggattatccgctttatccctacctggaataccgccagatcaccgatgacctgatgaatcaaccggcggtgacggtcactaactttgttcgcgctaaccccacgcttcctcccgctcgcacgctgcaatctcgtttcgtcaatgaactggcgcggcgtgaagactggcgtggcctgttagcctttagcccggaaaagcccggaactaccgaagcacaatgtaattactactatgcgaaatggaacaccgggcagagtgaagaagcctggcaaggggcgaaagagctgtggctaaccggcaagagccagcctaacgcctgtgacaagttatttagcgtctggcgtgcgtcaggtaaacaagatccgctggcgtatttagagcgtatccgtctggcgatgaaagcgggtaacactggcctggtaacagtgctggcagggcagatgcctgccgattaccagactatcgcctcggcaatcatttcactggcgaacaaccccaatacggtactgaccttcgcgcgtacaaccggagcgaccgattttacccgtcaaatggcggcggtggcgtttgccagtgtggcgcggcaggatgctgaaaatgcacggctgatgatcccatcgcttgcccaggcgcagcagcttaatgaagatcagattcaggagctgcgcgatatcgtcgcctggcgtttgatgggcaacgatgtcaccgacgagcaggcgaaatggcgcgatgacgccattatgcgctcgcaatctacttcgcttattgaacgccgtgtgcgaatggcgcttggcactggcgatcgtcgcggcctgaatacctggctggcgcgtctgcctatggaagcgaaagagaaagatgaatggcgttactggcaggcggatttattgctggaacgcggacgtgaagctgaagcaaaagagattttgcatcaactcatgcaacagcgtggtttctacccgatggttgctgcacaacgcatcggcgaagagtatgagctgaagattgataaagcgccgcagaatgttgacagcgccctgactcaggggccggagatggcgcgcgtgcgcgagttgatgtactggaatctcgataacaccgcgcgtagcgagtgggccaatctggtgaagagcaagtcaaaaacagagcaggctcaactggcgcggtatgctttcaacaaccaatggtgggatcttagcgttcaggcaacgatcgccgggaagctttgggatcatctggaagagcgattcccgctggcttacaacgatcttttcaaacgttacaccagtgggaaggagatcccgcaaagctatgcgatggcgattgcccgtcaggagagcgcctggaatccgaaagtgaaatcaccggtaggggccagcggcctgatgcagattatgccgggcacggcgacccatacggtgaagatgttctctattcctggttatagcagccctgggcaattgctggatccggaaacgaatatcaacattggcaccagttacctgcaatatgtttatcagcaatttggtaataaccgtattttctcctcagcagcttataacgccggacctggacgggtgcgaacctggcttggcaacagcgccgggcgtatcgacgctgtggcatttgtcgagagtattccgttctccgagacgcgcggttatgtgaagaacgtgctggcttatgacgcttactaccgctatttcatgggggataaaccgacgttgatgagcgccacggaatggggacgtcgttactga

SEQ ID NO: 156 - DNA, 1029 bp, Escherichia coli
atggcagagcaaacctcgcgtctcgcaataattattgatagcactggagcgaaaaataatgctgacaatctgacctcctcattagtcaaaatgacgcaggctggggaaactgctgcaaatagcgcagggaaagtgactaaggcaacagaagatgagaagaacgcgctcgcaaaattaaaagcagctattgatccagttggtgccgcaattgatactgtcggtcgacgctattctgaattaaagaaatttttcgataaagggcttattgataaagaagaatatgaatttcttgtccgtaaacttaatgaaaccacagaggaattgagcggggttgcgcaagcgcagagagaagccgagaaggccggaaaacttgctgccgctcagcaggaagcgcaggctcaggcctttcaaagaatgctggacaagatcgaccctctggctgcggcgctaagaaatcttgaacaacagcatgatgaacttaatgctgcgtttgcatccgggaaaataaatggttctcagtttgagaattatagccgaaaaatacaggaaacacggcgagagcttaccggagaggctcaggcagagcgagaagcagcaaaagcgcatgatgaacaggttgttgctttgcaacgtctgattgctcaacttgatcctgtcggaactgcttttaatcgtctggtagaacaacagaaacagctcaatgaagcaaaagctaaggggatgctttctcctgaaatgtatgaggagctttctggaaaacttcgtgctatgcggagtgagcttgaggttactcaatcacaattaagcaaaaccggaatgtcggcaaaacaaacggcttttgctatgcgcatgttgcctgcacaaatgacggatattgttgttgggttgtccactggtcagtcgccatttatggtgttaatgcagcagggcggccattcagctatgcaggagacaagaatcgccagcttacccgttacagcgatacccgctggcatgaagattccgtgcgtaaccgctggttcagcgtga

SEQ ID NO: 157 - DNA, 861 bp, Escherichia coli
gtgattcaccaacagcatatgcgcaacattgcgcagtggttgcaggaaaacggcatcacccgcgctaccgtcgcgccggactggatgtccattccttgtgggtttatggcttgcgatgcgcaacgggttatctgccgcatcgatgaatgccggggatggagcgccgggctggcgctggctccggtcatgttccgcgcccagctcaatgagcaggatttaccgctttcgctaaccgtagtcggcattgcaccggaaaagctatcagcatgggctggcgcagacgctgaacgcctgaccgttacagctctgcccgccattaccacttatggcgaaccggaagggaacctgctgacagggccgtggcagcctcgcgtcagctaccgaaaacagtgggcgcgctggcgggtgatgattctgccgatattgctgattctggttgcgctggcagtggagcggggcgtgacgttatggagcgtcagcgaacaggtggcgcaaagccgcacccaggcggaggaacagttcttaacgttgttcccggagcagaagcggattgtgaatttacgctctcaggtgacgatggcgctgaaaaaatatcgcccacaggccgacgatacccggctgctcgccgagttgtcagcgatagccagcaccctgaaatcagcgtcactttccgacatcgaaatgcgtggttttacctttgatcaaaaacgccagatacttcacctccagctacgggccgcgaactttgccagtttcgacaaactgcgtagtgtactggcaaccgattatgttgtgcaacaggacgcgttacagaaagagggtgatgcggtttccggcggcgtaacgttgcggaggaaataa

SEQ ID NO: 158 - DNA, 693 bp, Escherichia coli
atgcagtcaataacacctccattaattgccgttattggtagcgatggttcaggcaagtcaacggtgtgtgaacatcttattaccgttgtcgaaaaatatggtgctgccgaaagagttcatttaggaaaacaggccggaaatgtcggtcgtgcagtgacaaaattaccgttgatgggaaaatccttacataaaacaattgaacgaaatcaggtgaaaacagcaaaaaaattgcctggaccagttccggcgctggtaattacagcgtttgtcgcccgtcgcttactgcgctttcgtcatatgcttgcctgtcgtcgtcgcgggttaattgttctaaccgaccgttatcctcaggaccaaattcctggcgcttacgatggtacggtgttcccacctaacgttgaaggtggtcgttttgtctcatggctggcaagccaggaacgtaaagcgtttcactggatggcgagccataagcctgatctggtcatcaaactcaatgttgaccttgaagttgcctgtgcacgtaaacccgaccataaacgggaatcgctggcgaggaagattgccataacgccacagttaacctttggtggtgcacaactggttgatatcgatgccaatcagccactggaacaggtgttggttgatgcagaaaaagcgattacggattttatgaccgcgcgtggttatcactag

SEQ ID NO: 159 - DNA, 807 bp, Escherichia coli
atgactttacttaacatctccggcctttcccatcactatgcgcacggtggatttaacggaaaacatcaacatcaggcggtgctgaataacgtttccctgaccctgaaaagcggcgaaaccgtcgccctgctggggcgcagcggctgcgggaaaagtaccctcgcgcggttgctggtgggtttagaatcgcccgcgcaggggaatattagctggcgtggcgaaccgctggcgaaactcaatcgcgcccagcgtaaagcgttccgccgcgatattcagatggtatttcaggactccatcagcgccgtgaatccgcgcaaaaccgtgcgcgagatcctgcgtgaaccgatgcgccacctgctatcactgaaaaaatccgaacaactggcgcgcgccagcgaaatgctgaaggcggtcgatctcgatgacagcgttctcgacaaacgcccaccgcagttaagcggcggccagctccagcgcgtctgcctggctcgcgcgctggcggtcgaaccgaaactactgattctggatgaagccgtttctaaccttgatctcgtgttacaggcgggtgtcattcgcctgctgaaaaagctacaacaacagtttggcaccgcctgcctgttcatcacccacgacttacgcctggtagaacgcttttgccagcgggtaatggttatggacaacggacaaatcgtcgaaacccaggtggtgggagagaaattaaccttttcctctgacgccggacgtgtgctacaaaacgcggtattacccgcattccccgtgcgccgtcgcaccacagaaaaggtttaa

SEQ ID NO: 160 - DNA, 1251 bp, Escherichia coli
atgatggcgggacccgttttgtatcaggaccgcgccatgaaacagataacctttgctccccgtaatcacctgctcaccaataccaatacctggacgcccgacagccagtggctggtatttgacgtgcgtccttctggcgcgtcgtttaccggcgagaccattgagcgtgtgaatatccataccggcgaggtcgaggttatctatcgcgcgtcacagggcgcacacgtcggcgtggtgaccgttcatccgaagtcagagaaatatgttttcatccacggcccggaaaatcctgatgaaacatggcattacgacttccatcatcggcgcggagtgattgttgaaggcggcaagatgagtaaccttgatgcgatggatattaccgcgccgtatacgccaggagtgctgcgcggcggcagccatgtgcatgtctttagcccgaacggtgaaagggtgagctttacctataacgaccatgtaatgcatgaactcgatccggcgctggatttgcgaaacgtcggtgttgctgcgccgtttggcccggtcaacgtacaaaagcagcatccgcgtgaatacagcggtagccactggtgcgtgctggtgagcaaaaccacgcccacgccacagcctggcagtgatgaaatcaatcgtgcttatgaagaaggatgggtaggaaatcacgcgctggcatttattggcgacacactttcgccaaagggcgagaaagtgccggagctgtttatcgttgagttaccgcaagatgaagctggctggaaagcggcaggtgatgcgccgttaagcggaacggaaacaaccctgcccgcgccaccgcgtggcgtcgtgcagcgacgtttaacctttacccaccatcgggcttatccggggttagtcaacgtcccgcgccactgggtgcgctgtaatccgcagggtacacaaatcgcgtttttaatgcgagatgataacggcattgtgcaactgtggcttatctcgccacagggcggcgagccgcgccagttaacccataacaaaacggatattcagtctgcatttaactggcatccgtcaggagaatggttgggctttgtgctggataatcgaattgcttgtgcccatgcgcaaagcggcgaggttgagtatttaaccgaacaccacgccaattcaccttctgcggacgccgtggtcttctcgccggatggtcagtggctggcgtggatggaaggcggccagctgtggatcaccgaaactgatcgctaa

SEQ ID NO: 161 - DNA, 525 bp, Escherichia coli
aaacattcgtgggcaggcgtgaaacggacctggacggggaaaaatccaccaaactcgctgccgtactcgccgttcatcgtccagttgtccggcgcatccagttcccgcatcacggcgtgtgtcagctcacgacgttcatcacttccggcagcccggatatcttcatattcctgtgcgctcatggtctgtaatacattcagggtcagttcagttttcatcacagtatctcccttgctgccgccccgtctccggcggggcggtgtggttgttcatcaggcggcatcagccaggttatcggtgcgttcagtggcatctgtctgtggatgtggtgcacacatccagcctggaacccagcggttgtctttcatattgtgctctgcatgttcagccgcatcacctttcttcatcttctccgcgtcccgtgcggcaccggacagccctgcctcattcagggctgcgataatctgcggctttttcaggtgtccgaagaagtttgcttttgtcggctgccaccagtcacgcatg

SEQ ID NO: 162 - DNA, 2331 bp, Escherichia coli
atggacaaaaacaaagcagttcagacagtaaaagataggatcctggccgggcgggcaaaacaacccgttatctttcatggtcagctgaccgggaatatggatgtcgccattccacaggtgccggggggaagaaaggtcatctttgatggtagcgtgaacctgccggaaggtaccctgagtcaggacagtggcaccctgatattccagggacatccggttatccatgcctccatcagtggcagtgcaccggtcagcctgaaccagaaagactgggaaaaccgtcagtttacaatgaaaacactgtcgctgaaagacgctgacttccatctttcacgtaacgcctcgctgaacagtgacattaagtcggataacagccatatcacactgggaagtgacagggcatttgtggataaaaatgacggaacaggaaattatgtcattccggaggaaggtacctctgtcccggacaccgtgaatgacaggagccagtatgaagggaatattacgctgaaccataactcagccctggatatcggcagcaggttcaccggggggattgacgcttatgacagtgccgtcagcatcacctctccggacgtcctgttgacagccccgggtgcttttgccggcagttcactgacagtgcatgatggcggtcatcttacagcactgaacggtcttttcagcgacgggcatattcaggccggtaagaacggcaaaatcaccctgagcggtacaccggttaaagatacggctaatcagtatgcccctgctgtatatctgacggacggatatgacctgaccggcgataacgcagcactggaaattacccgtggagcacatgcttccggtgatattcatgcctctgcggcatcaacagttaccatcgggtctgacacgccggcagaactggcttctgcggaaacggctgcatcggcgtttgccggcagtcttcttgagggctataacgcagcattcaatggtgccataaccggtggcagggctgatgtcagtatgcataatgcactgtggactctgggtggggactctgccatccacagtcttaccgtcagaaacagccgtattagttctgaaggagaccgtacattccgtaccctgacggtgaataaactggatgcaacaggcagtgattttgttttgcgtacggacctgaaaaatgccgataaaattaatgtgactgaaaaagccactggttcagataacagcctgaacgtcagctttatgaataatcctgctcagggacaggccctgaatattcctctggtcacggcaccggcgggaacttcagcagagatgtttaaggccggcacccgggtgacaggtttcagtcgggtgaccccaaccctgcatgttgataccagtggtggcaatacgaagtggatactggatggttttaaagcggaggctgataaagccgctgccgcgaaggctgacagtttcatgaatgccgggtataaaaacttcatgacggaagttaacaatctgaacaaacgtatgggtgacctgcgtgacacaaacggtgatgccggtgcctgggcgcgcatcatgagtggtgccggttctgcagacggtggttacagtgataattacacccatgttcaggtcggctttgacaaaaaacatgaactggacggtgtggacctgtttaccggtgtcacgatgacctataccgacagcagtgcagacagccatgcattcagcggaaagacgaaatcggtggggggcggtctgtatgcttcagcattgtttgagtccggtgcctatatcgatttgattggtaaatatattcaccatgacaatgattacacaggtaactttgctagcctgggaacgaaacactacaacacccattcctggtatgccggtgctgaaacgggttaccgctatcacctgacagaggacacgttcattgagccgcaggctgaactggtttacggcgccgtgtccgggaaaacattccgctggaaagacggtgatatggacctgagcatgaagaacagggacttcagtccgctggttggaagaacaggggttgaactgggcaagaccttcagtggtaaggactggagtgtgacggcccgtgccggaaccagctggcagtttgacctgctgaataatggagagaccgtactgcgtgatgcgtccggggagaaacggataaaaggagagaaggacagccggatgctgtttaatgttggtatgaatgcgcagataaaggacaatatgcgctttggtctggagtttgagaagtcagcctttggtaaatataacgtggataatgcggtaaacgcgaatttccggtatatgttc

SEQ ID NO: 163 - DNA, 225 bp, Escherichia coli
cgcaaaggatatgacccagggcggtcagattgcgtccatgcgtatccgcatgttcagccagatcgccaatatcatgctttactgcctgtttatttttttctggatactcgttggtctggttttatggataaaaataagctggcagacgtttgtgaacggctgtatttactggtggtgtaccacgctggaaggcatgcgggatttaatcaaatcccagccggtcta

SEQ ID NO: 164 - DNA, 729 bp, Escherichia coli
atgaaaacaaaaaaattgatgatggttgcactggtcagttccactctggctctttcagggtgtggtgcgatgagcacagcaatcaagaagcgtaaccttgaggtgaagactcagatgagtgagaccatctggcttgaacccgccagcgaacgcacggtatttctgcagatcaaaaacacgtctgataaagacatgagtgggctgcagggcaaaattgctgatgctgtgaaagcaaaaggatatcaggtggtgacttctccggataaagcctactactggattcaggcgaatgtgctgaaggccgataagatggatctgcgggagtctcagggatggctgaaccgtggttatgaaggcgcagcagttggtgcagcgttaggtgccggtatcaccggatataattccagttctgccggtgccacactcggtgtgggccttgctgccggtctggtgggtatggctgcagatgcgatggtggaagatgtgaactataccatgatcacggatgtgcagattgcagagcgtactaaggcaacggtgacaacggataatgttgccgccctgcgtcagggcacatcaggtgcgaaaattcagaccagtactgaaacaggtaaccagcataaataccagacccgtgtggtctcaaatgcgaacaaggttaacctgaaatttgaagaggcgaagcctgttctcgaagaccagctggccaaatcaatcgcaaatattctc

SEQ ID NO: 165 - DNA, 1449 bp, Escherichia coli
atggtggtgatttatgaccgttcgggggaatttgttaaaagttactatgatccctccatcgataaaatcctgaatccgctggatgcccgctgtgccgcctgggatttgtggaaggagtgcctgacacagccggattttgataataccgcgaacacgctgatcccgatgggcacaaaagaggacccgttctggcagggttcaggacgtaccatttttgcggaagcggcgtacctgatgcgtaatgaccccaaccgcagctacagcaaactggtggacacactgctttccatcaaaattgaaaaactgcgtaccttcctgcgtaattcaccggcagccaacctggtggaagagaaaattgagaaaacggcgatttccatccgtgctgtgctgaccaactacgtgaaagccatccgttacctgcaggggattgagcataacggtgagtcttttaccatccgtgactggatgcgtggtgtccgggaagatcagaaaaacggctggctgtttatctcgtcgaatgccgacacccatgcctccctgaagccggtgatctccatgtggctgtccattgccattcgtggtctgctggcaatgggagaaaaccgtaatcgtcgtgtgtggtttttctgtgacgagttacccacgttacacaaactgccggacctggtggagatcctgccggaagcccgtaagttcggtggctgttatgtgtttggtatccagtcctatgcccagctggaagatatctacggtgagaaagcggcggccacgctgtttgacgtcatgaacacccgtgcctttttccgttctcccagccataagattgcagagttcgctgccggtgaaattggtgagaaagagcacctgaaagccagcgagcagtattcttacggtgctgacccggtacgtgacggggtatcgaccggtaaggatatggagcgtcagacgctggtcagttattccgacattcagtctctgccggatctgacctgctatgtcactctgcccggaccgtatccggcagtcaaactctccctgaaatatcagacacgaccgaaggtcgctccggagtttattccgcgtgacatcaacccggaaatggagaaccgtctgagtgccgtacttgctgcaagggaagcagaaggtcgccagatggccagcctcttcgaaccggaggttgcctccggagaagacgtaactcaggctgaacagccacaacagccacaacagccacaacagccacaacagccacaacagccacaacagccacaacagccacaacagccacaacagccacaacagccacaacagccacaacagccacaacagccacaacagccacaacagccacaacagccacaacagccacaacagccacaacagccacaacagccacaacagcccacaacagtcacaacagtcacaacagccagtgtcttctgtcatcaa

SEQ ID NO: 166 - DNA, 1551 bp, Escherichia coli
atgatagttaaatttcatgccaggggaaaaggtggtggcagtggtccggttgattacctgctggggagggagcgtaaccgggaaggggcaacggtgcttcagggtaatccggaagaagtccgggaactcatcgatgccacgccatttgcgaagaaatacacgtccggtgttctgtcgttcgcggagaaggaactgccgccgggaggacgtgaaaaagtgatggcgagctttgagcgcgtactgatgccaggtctcgaaaagaatcagtacagcatcctgtgggtggagcaccaggacaagggacggcttgagctgaattttatcattccgaacatggagctacagaccggaaaacgtctccagccgtactacgaccgggcagacaggccgagaattgatgcctggcagacgctggttaatcaccattacgggctgcatgaccccaacgccccggagaaccgccggatactgactctctctgataacctgccggaaacgaaacaggcgcttgctgagagcgtcacacgctggatagacgctctttatcatgtcggggagataaaaggccgtcaggatgtgattcaggcgctcactgaggcagggattgaagtggtcagggtgacgcgaagcagtatcagcattgcagacccgaacggcgggaggaatatcaggctgaaaggagcattttatgagcaatcttttacagacgggcgcggagttcgagaaaaagctgaaagagagagccgaatctacagagaaaatgctgaacaacgagttcaggaggctcggcgaatctgtaagcgaggctgtgacatcaaacgagacgaaaatcagagacgctatagccctgttcacagcctcgacagagaaatcgctggaaaaacacagggaaggggtgaaagaggcgatgatgcagcacaggaaggacgtgttaaagctggcagggaatacgggcatgatgttactggggatagtctttctcctgtttaccgcgagtggcgggacgctctggtatcttggcgggaggatacaggcgaacctggaagaaatcaggaagcaggaagagacattgcacaaactgaacgcgaagacatggggcgtggagtttgtgcaggacgggaacaggaaatttctggtccttccgtacgggaaatcagcagaggtgattccctttcaggggaaagagtgggtacatctgaaggagtgacacagaatgacagagctggaaacacatttgctgaacgccttagagcagctgcaacaggactatatgcagcggctgagcgaatgggagagcgccttcgtggaattgcagaagatgttttcgcgtacgcaacgggacaacgcgatgctgaacgagcgggtcatgcagttgagtcagcaggtgcagcacttgagcgagcagacagaacgcttgagccagttatacagcgagaactggagataagagaggaacgactgatacaggagcgcgaacatgcgttatccctggagcgtgagcgccagctggaaatacaggaacgcacactggatggtccttcgctgggatgg

SEQ ID NO: 167 - DNA, 4092 bp, Escherichia coli
atgaataaagtgttctctcttaagtatagttttttagccaaaggttttattgctgtttctgaacttgcccgtcgcgtttctgttaaagggaaactgaagagtgcttcatcaataattatttcaccaataacaattgctattgtttcttatgcacccccatctcttgctgcaacagttaatgcagatatatcgtatcaaacatttcgggattttgccgaaaataaaggagcttttatagttggcgcatcaaatataaatatctacgataagaatggagtgttagttggagtgcttgataaagctccaatgcctgattttagtagcgccacgatgaatacagggacattaccaccaggagaccatacactgtactcacctcaatatgttgtcacagcaaagcatgttaatggatcagatataatgagttttggacatattcaaaataattatactgtagtaggagagaacaaccataatagccttgatattaaaatacggcgtttaaataagattgtcacggaggtcgcccctgcagaaatctccagtgttggagctgtaaatggcgcttatcaagaaggggggcgttttaaagccttttataggcttggaggtggattgcaatatataaaggataaaaatgggaatcttacaccggtatatacaaatggtggtttcctaaccggaggtactatcagtgctttaagctcatataacaatggccaaatgattaccgcacctacaggcgatatatttaatccagctaatgggcctcttgcaaactatctaaataaaggtgatagtggctctcctttatttgcgtatgactctctggacaaaaaatgggttttagttggcgttctgtcatcaggaagcgagcatggtaataactgggttgtcacaactcaagattttcttcatcagcaaccaaaacatgattttgataaaacaatatcatatgactctgaaaagggtagcttacaatggagatataataaaaattcaggagtgggaacattaagtcaagagagcgttgtgtgggacatgcatggaaaaaaagggggagatctaaacgcaggtaaaaatcttcaatttacaggaaataatggagagattattttacacgactctatagatcaaggggctggctatttgcagttttttgacaactacacagttacatccttaactgaccaaacatggaccggaggtggtatcattactgaaaaaggtgtaaatgtgctttggcaggttaatggtgttaatgatgataacttacataaagttggtgaaggcacattaactgttaatggaaaaggggttaataatggaggactgaaagtcggtgatggaaccgtaattctgaatcaacgccctgatgataatggacacaagcaagcctttagctctattaacatttccagtggtcgtgcaacagttatactttcagatgctaatcaagttaacccagataaaatatcatggggatatagaggcggtactcttgatttaaatggaaataatgtaaactttactcgtcttcaggctgcagattatggtgctattgtttctaacaataacaaaaacaaatctgaattaacacttaaattacaaacactaaatgaaaatgacattagtgttgatgtgaagacatatgaagtttttggggggcatggtagtccaggtgacttatattatgttcctgcatcaaatacttactttatcctgaaatcaaaggcgtacggtccatttttcagtgatttagataataccaatgtctggcaaaatgttggtcacgatcgtgataaagcgattcaaatcgtgaaacagcagaagattggggaaagctctcaaccttatatgtttcatggacaacttaatggttatatggatgtaaatatacatccactctctggtaaggatgtgctgactcttgatggttctgttaatctgcctgaaggggtgataacgaaaaagtcaggtactctgatatttcaagggcatccggtgattcatgctggaatgacaacctcagccggccagagtgattgggaaaatcgtcagtttacaatggataaactgaggcttgatgcagcaacattccatctctccagaaatgctcatatgcagggagatattagtgctgccaacggaagcaccgtcattctgggaagttctcgggtctttactgacaagaatgacggaaccggtaatgcggtatcttctgttgaagggagttccattgcaacaacagctggtgaccaaagttattacagcggtaatgtgctgctggaaaaccattcgtctctagaggtcagggagaattttactggtggtattgaggcttatgacagttctgttagtgtgacctctcagaatgctatttttgaccatgttggtagctttgttaatagtagtctgcttctcgaaaaaggagcaaaactgacagcacagagtggtattttcacaaataacactatgaaaataaaagaaaacgcctccctgactctgacagggataccttctgtaggaaagccagggtattattcacctgtgacctcgactactgaaggaattcatctcggtgagcgagccagcctttcagtgaaaaatatgggctatctgagttcaaatattacagcagagaactctgcagcaattattaatctgggagacagtaatgcaactatcgggaagacggactctccattattcagtaccttaatgaggggatataatgctgttttgcagggcaatattatggggccccagagctcagtgaatatgaacaatgctctgtggcactctgatagaaattcggaactcaaagagctgaaagccaacgactcccaaatagagttgggtgtaagagggcattttgcaaaactgcgggtaaaagagcttattgcgtctaactcagtgtttcttgtacatgcaaacaatagccaggctgaccagttgaacgttaccgacaaactgcagggcagcaacaatactattcttgttgacttttttaacaaagcagccaatggtacaaatgtgacgttaattactgcaccaaaaggcagtgatgaaaatacattcaaagccggaacccagcagattggattcagtaatatcacgccagaaatcaggacagaaaatacggatacagccacacagtgggtgctgactggatatcagtctgtcgctgatgccagagcctcgaaaatcgcaacggactttatggattcaggttataaatctttcctgacggaagtcaataatctgaacaaacgtatgggagatttacgggatagtcagggagatgctggagggtgggcgcgtatcatgaatggtaccggttcaggtgagagtggttacagagataactatacccacgttcagattggtgcagacagaaagcatgagctgaacggtatagatttattcaccggtgcattactgacttatacagacaacaatgctagcagccaggctttcagcggtaaaacaaaatcgctagggggaggggtgtatgcatcaggtctctttgagtctggagcttattttgacctgattggtaaatatctccatcatgataatcggtatacgttgaattttgcctccttgggggaaagaagctacacctcccattctttgtatgctggagctgaaatcgggtatcgttatcacatgtcagaaaatacatgggtggaaccacagatggaactggtttatggttcggtatcaggaaagtcatttaactggaaagaccagggaatgcaactgagtatgaaagacaaagactatcacccactaattggtcgaacaggtgtggatgtaggtagagcgttctctggagatacctggaaagtaacagtacgtgcaggactgggttaccagttcgatttgctggcaaatggagaaactgttttacaggatgcttctggtaaaaaacacttcaaaggtgaaaaagacagcaggatgctaatgaacgtggggacgaatgtggaagttaaagacaatatgcgttttggtctggagttggagaagtcggcgtttgggagatataacatagacaactctataaatgctaacttccgttattatttc

SEQ ID NO: 168 - DNA, 222 bp, Escherichia coli
atgaactggacgccgacgaccaggctgacatctgcgaagcgcttcacgaccacgctgacgagctttaccgcagctgcctcgcacgcttcggggatgacggtgaaaacctctgacacatgcagctcccggagacggtcacagcttgcctgtgagcggatgccgggagcagacaagcccgtcagggcgcgtcagcgggttttagcgggtgtcggggcgcagcca

SEQ ID NO: 169 - DNA, 609 bp, Escherichia coli
tcccgcagccagggctatcgccgtcgcaatcatgccaatcggcgtcatcgacatgatcctgctgacaatactgatggcaccgccaacgcccatcaatcccagtttcagaatcgcaagaccggcagcaagcccgacgacgccgcgaataacccggggattttcatccgcaaacttcgtgaatttttcccccaacgcccccaaccattgcgtgatatttttagcgtcaccagaaaatgcgccgccaatagctgcaagaccgttagttgcggtccccgtcattgcctcccacaggttggacagcgtaccaagctgtgcctgaacacgtttattcaggctggcctgtttattcatcttctgctggatctgatcgtaaccatcctttcctttatcgatcagagcattgaccacctgaagggtttcggcatcatcaccaaatattgccttaagtacacctgttcgcttaacgtcggtcagttttcgcagctttgccagttgcttaaacatgttatcaagaccgccaaaactccctttgccgtcagtaaaatcgagctgtaccccgagtttctggcgggccatgactttattgacgtccctgattttcttaacgct

SEQ ID NO: 170 - DNA, 525 bp, Escherichia coli; identical to SEQ ID NO: 161

SEQ ID NO: 171 - DNA, 1779 bp, Escherichia coli
atgtcggcaccgattacgggacaaacgatcacgtttgaacaaatcagcgaaacattgcgcacacagtatagcgatgcggaaaaaagactgcaggacagcagcaaaacgcaagttgatcccatgcggcttaataaaaacccgaaatcccttgataatgatattcgcgctcgtcttgaaaacaaaccgatgcttgctccgcctgaaatgcaggttttagattcagacaacgccactacagcaaagacgaacgatgcccgcctgacgatgattttgggtaatctaacaggcattgccgatcaggatattacaacacgattgcataataaccttgacagcaccctgcttcgacacgaaatggcacataataagtttcgtgaattaagtgacgcttactcctcgtcattagattccgcgcaaaaagccaacgacatcatgcatcaggccaataataattacaatgcggtcgataaaaaggtgcaatcgctggagaaaaaagtcaatgcattgaatcaagagctgtcgcaactgcaacctggcgatccgcaatataataaagtgctgacgcaaaaaaatgcggctgagaaaacactcacgctgtcattacaaaaaaaatcgttagctgagaaatcgttaaatacagccattatggatgctgatgctgcgatcggccaaagtatggaaatttttgacgaaattcaacagcaagaacagattaataactttaccaccaatatttgcctgacccaggaaaaccagaaaaacagaaacgcgacagccacatttatccttttgattacctcagtaatggaagttattggtgataccaattgcgaatctattaaaaatcagtctgaggtaatgaaagagattaaccatgtcagggaaaataaactcaatgaaacagcgcgtaaatatactaaatggacaaaagttgtaaaaatcgttaatgagtgtgtaactgtagctaccattgccatgagcgcaatcttaattgttgttggtcttcttgctgcagttccaagtggtggttcaagtattgcgggtgcattagcacttattggaggaatagcgggcgcagtagtattaggtgtagatatcacttgtcaaatcgctctgggcaccacggctaccggctggattttagggaaagttgtagaaggtctttcggctgctattaaaacagttgatcccactctgctcgcaatcaccgcgcttctggacgttattggtgtcgatcaagatacgattgaactggttaaaagtatttacgcaagtgcagccgcttctattgtcatggcgacagtaatgattggtgcagctgtaatatgttctgtagcaataggggccgttgtttctgcattatcaaaaacagccgcagaagaagtcaccaaagaaataacaagcactataaaatcaaccattgaatctattattaaatccgtttcaaaaaatattataaaggtattaaacagagtatgcagcatgatacaaacatcagtcgtagttttgaagttgattgccaagataagtaatgctctggagaaaataggcttagctatctgtgaaacagcaacatcgataatgaattattgtgttgctgaaaactctgccgacatggcaattttacaacaggacatgagtaatctatcaaaaacgcgtgaacaaatgctttcagtattgcaaagggtggataaaaccgtcgaacaagaggtaagtcagatggtaagagtattacaacaccgaactgaaaccttaaaatttgcttcccattctatcgta

SEQ ID NO: 172 - DNA, 324 bp, Escherichia coli
atgagcgtcacaaagcctaaaagattgagatttcccggtacgctcagttggcgggcgatagtcatcaccagagatgtcgtgcccataaaggtaccgccaaaaccaagactgctgatgataagcaagagaggcgagtcgctggcgagagtaagcagcacacagatagcctgcaccagcaaattcgccgtcaggcagggcaaagcccaccaacgttttgctgcccatagccagccaaagcaaccaggcacaattgataagccgactaacgtccagagatgggcggttaacaatggtgagcctgcatctttcgccatgagcggcagg

SEQ ID NO: 173 - DNA, 381 bp, Escherichia coli
atgttctcttgcttttgtcagcaagatagccagatcaatgtcgatcgtggctggctcgaagatacctgcaagaatgtcattgcgctgccattctccaaattgcagttcgcgcttagctggataacgccacggaatgatgtcgtcgtgcacaacaatggtgacttctacagcgcggagaatctcgctctctccaggggaagccgaagtttccaaaaggtcgttgatcaaagctcgccgcgttgtttcatcaagccttacggtcaccgtaaccagcaaatcaatatcactgtgtggcttcaggccgccatccactgcggagccgtacaaatgtacggccagcaacgtcggttcgagatggcgctcgatgacgccaactacctc

SEQ ID NO: 174 - DNA, 243 bp, Escherichia coli
gtactatatatatatgaccatgtctcattattaccgtttaccgagctccccgtagtcgcttccgctgccagtaatgggcgcttgaaggtcacgcctgccgaactggtaaacgtttccggcatatggccccagtatttcgcttttggcgaatccgggctggttatcaccgtgaaaatgacatccagcgtgacgcttttcgaggtatcgcgcatgagttctgcgctgagcggcgttgacagccca

SEQ ID NO: 175 - DNA, 297 bp, Escherichia coli
tcaaaggcaaaccgcaaaccctgcgatcgccacatcaggcttcagtactgggcatcggattctgcccggaagacaggaaaacagatggcatcatcgccgctgcctcggtgcgggaaaatatcatcctcgctctccaggcccagcgcggctggctacgacccatttcccgcaaagagcagcaagagattgccgaacgctttatccgccagcttggcattcgcacaccttcaactgaacaaccgattgaatttctctccggtggcaatcagcaaaaagtgctgctttcacgttggctac

SEQ ID NO: 176 - DNA, 417 bp, Escherichia coli
gcggaagcatcaccgatatccaggatctgctcgtcagctttcacatcgttaacagatttcagggtagccggtgcagtttcagagaactcggttgctacgcgaacatcagacggaaccgggatgttgcaggtggtcagcagacgtttagcttcgtcaaccaggtcagcttcgtacagggatttacccacatcgtggccttgtgccgcgataaaggtgttagcgataccaccaccaacaatcagctggtcagcgattttagacagggagtccagaacggtcagtttggtagatactttagaaccaccaacgatagccaccatcgggcgagcaggttctttcagtgctttacccagcgcgtccagttcagctgccagcagcgggcctgcgcacgcaacgtcagcgaatttaccgataccg

SEQ ID NO: 177 - DNA, 1605 bp, Escherichia coli
atgcgtatttccttgaaaaagtcagggatgctgaagcttggtctcagcctggtggctatgaccgtcgcagcaagtgttcaggctaaaactctggtttattgctcagaaggatctccggaagggtttaacccgcagttgtttacctccggtactacctatgacgcctcttccgtgccgctttataaccgcctggttgaatttaaaatcggcaccaccgaagtgatcccgggcctcgctgaaaagtgggaagtcagcgaagacggtaaaacctataccttccatctgcgtaaaggtgtgaagtggcacgacaataaagaattcaaaccgacgcgcgaactgaacgccgatgacgtggtgttctcgttcgatcgtcagaaaaacgcgcaaaacccgtaccataaagtttctggcggcagctacgaatacttcgaaggcatgggcttgccggagctgatcagcgaagtgaaaaaggtggacgataacaccgttcagttcgtgctgactcgcccggaagcgccgttcctcgcggatctggcaatggacttcgcctctattctgtcaaaagaatatgctgacgcgatgatgaaagccggtacaccggaaaaactggacctcaacccaatcggcaccggtccgttccagttacagcagtaccaaaaagattcccgtatccgctacaaagcgtttgatggctactggggcaccaaaccgcagatcgatacgctggttttctctattacccctgatgcttccgtgcgttacgcgaaattgcagaagaatgaatgccaggtgatgccgtacccgaacccggcagacatcgctcgcatgaagcaggataaatccatcaacctgatggaaatgccggggctgaacgtcggctatctttcatataacgtgcagaaaaaaccactcgatgatgtgaaagttcgccaggctctgacctacgcggtgaacaaagacgcgatcatcaaagcggtttatcagggcgcgggcgtggcagcgaaaaacctgatcccgccaaccatgtggggctataacgacgacgttcaggactacacctacgatcccgaaaaagcgaaagccttgctgaaagaagcgggtctggaaaaaggtttctccatcgacctgtgggcgatgccggtacaacgtccgtataacccgaacgctcgccgcatggcggagatgattcaggcagactgggcgaaagtgggcgtacaggccaaaatcgtcacctacgaatggggtgagtacctcaagcgcgcgaaagatggcgagcatcagacggtaatgatgggctggactggcgacaacggggatccggataacttcttcgccaccctgttcagctgcgctgcttctgaacaaggttccaactactcaaaatggtgctacaagccgtttgaagatctgattcaaccggcacgtgctactgacgaccacaacaagcgtattgagctgtataagcaagcacaggtggtgatgcacgatcaggctccggcactgatcatcgctcactccaccgtgtttgaaccggtacgcaaagaagttaaaggctatgtggttgatccattaggcaaacatcacttcgaaaacgtctctatcgaa

SEQ ID NO: 178 - DNA, 76 bp, Escherichia coli
  misc_feature (1)..(1): n is a, c, g, or t
nccttttgaaccaagaatagatatttctttggaggataaatttatctataaaaggtatagaagagatgccggaagt

SEQ ID NO: 179 - DNA, 58 bp, Escherichia coli
ctggcggtggtggaagccaaaaaaaccagcgtcaatgccgagcaaggacgaattcagg

SEQ ID NO: 180 - DNA, 61 bp, Escherichia coli
gcggtggtggaagccaaaaaaaccagcgtcaatgccgagcaaggacgaattcaggcccggc

SEQ ID NO: 181 - DNA, 52 bp, Escherichia coli
gtccggtcgggttacggcgtccggtttcccagctcttgatggtgtcgaggct

SEQ ID NO: 182 - DNA, 52 bp, Escherichia coli
ggctcaaccgaaaacaccggaggaggtgattacccgctggcagggaaaatca

SEQ ID NO: 183 - DNA, 67 bp, Escherichia coli
gaatatggcggcgcagggcgtaaccagaccggctcaaccgaaaacaccggaggaggtgattacccgc

SEQ ID NO: 184 - DNA, 43 bp, Escherichia coli
tgatgacgatgagtgggggcgtggcgctggctacacttgcctg

SEQ ID NO: 185 - DNA, 46 bp, Escherichia coli
atcattaaccgctgggcgccgccgtctgacaataacaacaccgaca

SEQ ID NO: 186 - DNA, 67 bp, Escherichia coli
caccacaaaaatagttcttcctgcaccggagaaattcgtatcggatgccgccaggctgttgcagggg

SEQ ID NO: 187 - DNA, 61 bp, Escherichia coli
cagcattgcagacccgaacggcgcaggcaagctgattgcagggaggcagcgtatgctgaat

SEQ ID NO: 188 - DNA, 303 bp, Escherichia coli
ccagccattattgagtatgtccttgccgtcgattccatcctttgtattgtcgggattactgttgatttgtttgccgttttcttcatttgccagcgccaccacatcacatatctctttcagctacgccgcccgccagcggatgcaaaaccgtgcgcgtttattaaaacagtaccaaacccatctgaaaaagcaggtcagctatattgtggaaggcaatgccgaaagcagaagggcgctacgccagcacaaccgcgaacagataaaacagcatccagaatggtttcctgcaccgctcaaggcgag

SEQ ID NO: 189 - DNA, 63 bp, Escherichia coli
tatgtattccgcgattattggcgcgattggtgcactgcgcgggccgaagcacggcggggcgaa

SEQ ID NO: 190 - DNA, 186 bp, Escherichia coli
ccgcttctttgccgataccggagaaaacggggtgatgatgccggtgaaaaatccgatgtccggcaccggtctgcgctggaagccgctgcgcgatcagatctttttcctcgccgtcgaacagcagttgccgctgaacgggcaaaatggcgcatccgataccatgctgcgcgccagcgcctcattctt

SEQ ID NO: 191 - DNA, 141 bp, Escherichia coli
aaccgacatcgccctgcccggcccgctgccgttcatcctctcccgcacctacagcagttaccggacaaaaacgcccgcgccggtggggagcctcggccccggctggaaaatgcctgcggatatccgcttacagctgcgcga

SEQ ID NO: 192 - DNA, 99 bp, Escherichia coli
ccgtggcagcggatgacggcagtgagcggctggtcagcacggcccggacgacggaaaccacataccgcttcacgcagctggcgctggggaactacaggc

SEQ ID NO: 193 - DNA, 174 bp, Escherichia coli
accgaccggcgcactggacagccattcaggcgaagaggtgatggcgatcctgcatcagctgcgcgatcgcgggcatacggtgattatcgtcactcacgatccgcaggtcgctgctcaggccgagcgggtgatcgaaattcgcgacggcgaaattgtgcgcaatcctcccgccat

SEQ ID NO: 194 - DNA, 66 bp, Escherichia coli
gtcacgaacataaaccggtcggttcgttcctgtttgccggccctaccggggtcgggaaaacagagg

SEQ ID NO: 195 - DNA, 114 bp, Escherichia coli
ttacgtgcaggcgggaatgccgaaaaagaaaaaacggacgctttcgccagattatccacgcgacccgacgcaggtttatctgtggctggaagaagctggttggcaaattatggg

SEQ ID NO: 196 - DNA, 195 bp, Escherichia coli
gggtacatgccggcggggaagccactgcagtcacccagaacacgggcggtgcactggttaccagtactgctgcaactgtcatcggcacaaaccgtctggggaatttcacggtggaaaacggtaaggctgacggtgttgttctggaatccggcggtcgtctggatgtactggagagccattcagcacagaataccc

SEQ ID NO: 197 - DNA, 252 bp, Escherichia coli
ccgggacgggtaatccatctgcggcaattaatatggttcgaaaacacgcgaccagtcgtgaatttaaaggcgatgtctcggcggaatacggtagctggaacaaagaacggtatgtggcggatttacaaagcccactcaccgaagacggtaaaatccgcgcgcgaattgtcggcggctaccagaataacgactcatggctggaccgctacaatagtgaaaagaccttcttctccggcattgtcgatgctgatt

SEQ ID NO: 198 - DNA, 351 bp, Escherichia coli
ttgatggcattaaagatctcgccgttcagtatcgcgatatcccgctgctgtcccgtacccacggtcagccagccacgccgtcaaccatcggtaaagagatggcaaacgtcgcctaccgtatggagcgccagtaccgccagcttaaccaggtggagatcctcggcaaaatcaacggcgcggtcggtaactataacgcccacatcgccgcttacccggaagttgactggcatcagttcagcgaagagttcgtcacctcgctgggtattcaatggaacccgtacactacccagattgaaccgcacgactacattgccgaactgtttgattgcgttgcgcgcttcaacaccattc

SEQ ID NO: 199 - DNA, 99 bp, Escherichia coli
ccgtggccgcggatgacggcagtgagcggctggtcagcacggcccggacgacggaaaccacataccgcttcacgcaactggcgccggggaactacaggc

SEQ ID NO: 200 - DNA, 56 bp, Escherichia coli
gcaagggctggaatacttccatcagctgaaaaaatctggcaaaccagtgattgcca

SEQ ID NO: 201 - DNA, 87 bp, Escherichia coli
ttaccggggcgacaatcctgtgcttctcctttaccggctttgacggcatcagcaatctgtcggaagaaaccaaagatgcagagcgcg

SEQ ID NO: 202 - DNA, 603 bp, Escherichia coli
acaaacggtaaccgagtaaatgacagatcttcccgacagcacccgctggcaattgtggattgtggctttcggcttctttatgcagtcgctggacaccaccatcgtaaacaccgcccttccctcaatggcgcaaagcctcggggaaagtccgttgcatatgcacatggtcattgtctcttatgtgctgaccgtggcggtgatgctgcccgccagcggctggctggcggacaaagtcggcgtgcgcaatattttctttaccgctatcgtgctgtttactctcggttcactgttttgcgcgctttccggcacgctgaacgaactgttgctggcacgcgcgttacagggcgttggcggtgcgatgatggtgccggtcggcaggttgacggtgatgaaaatcgtaccgcgcgagcaatatatggcggcgatgacctttgtcacgttacccggtcaggtcggtccgctgctcggtccggcgctcggcggtctgctggtggagtacgcgtcgtggcactggatctttttgatcaacattccggtggggattatcggtgcgatcgccacattgatgttaatgccgaactacaccatgcagacgcggcgctt

SEQ ID NO: 203 - DNA, 87 bp, Escherichia coli
cttttaccgatattaaccgcgtcagcgaactgctctctgtccccacgaaagatgcctcacgagatagctttcccggcgatcacggca

SEQ ID NO: 204 - DNA, 111 bp, Escherichia coli
cgcaattttgctgaatgtgcttgccggagctgcattgtttactctcgcgcggatgtacgagcgacgtattttcattccggcggaaagcgacgccctgcgactggaagaaca

SEQ ID NO: 205 - DNA, 69 bp, Escherichia coli
tcccacgcagtttcaaaacaatgcgcagttcagtctggcaggcagcggctacgtcaatatgggagcgta

SEQ ID NO: 206 - DNA, 162 bp, Escherichia coli
tcgcaccgccagcagcctcgccaaccagtatcacatcgacagcgaacaggcccgacgggtgctggataccactatgcaaatgtacgaacagtggcgggaacagcaaccgaagctggcgcatccgcaactggaggcgctactgcgatgggccgccatgctgca

SEQ ID NO: 207 - DNA, 1149 bp, Escherichia coli
ttccttgtgcggggcgtgatgctttaccatacttgcccctggttgaatctgttaaatggacccctcatgttcaagcgtcgttatgtaacattgcttcccctttttgtgttgcttgccgcctgtagcagcaagccaaaacctactgagactgaaacgaccaccggaacgccgtctggcggcttcctgcttgagccgcagcacaatgtgatgcagatgggcggcgatttcgctaataacccgaatgcccagcagttcatcgacagaatggtgaacaaacacggtttcgatcgtcagcagttgcaggaaattctctcccaggcgaaacgtctggattcggtactgcggctgatggataaccaggcaccaaccacatcggtgaaaccgccatcaggtccgaacggcgcatggctgcgttatcgcaaaaaatttattacgccggacaatgtgcagaacggtgtggttttctggaatcagtatgaagatgcgttgaatcgcgcgtggcaggtgtatggcgtaccgccggaaattatcgtcgggattatcggcgttgaaacccgctgggggcgcgtgatggggaaaactcgcatcctcgatgcgctggcaacgctgtcatttaactacccacgccgcgcggagtatttctctggcgagctggaaaccttcctgctgatggcgcgcgacgagcaggacgatccgctcaatctgaaaggttcctttgccggggcgatgggctacggacagtttatgccgtcgtcttacaaacaatatgcggtagatttcagcggcgacgggcatatcaacctgtgggatccggttgatgcgatcggtagcgtggcgaattatttcaaagcgcacggctgggtgaaaggcgatcaggtcgcggtaatggcaaacggtcaggctccaggcttgccaaatggcttcaaaaccaggtacagcatttcgcagcttgccgcggcaggtttaacgccacagcagccgctgggcaaccatcaacaagccagcctgctgcgtctggatgttggaacaggttaccagtactggtacggtctgccgaacttctacaccattacccgttataaccacagtacccattacgcaatggcggtctggcagttaggacaagccgtggcgctggcgcgcgtgcag

SEQ ID NO: 208 - DNA, 165 bp, Escherichia coli
aaaaggttacaccacggggcattctccgcagtcaaagccgctggcgcagatgggcggcctggtagcaacccgcagtatcgggcagttctccacactctacggcgcaatcgaagatatggtcgttggtctggaggcagtgttggcagatggcaccgtcacacgcat

SEQ ID NO: 209 - DNA, 1116 bp, Escherichia coli
tttaacctgaagaagagaacaatgaaaggacgttgggtaaagtaccttcttatgggcacggttgtggcaatgcttgccgcctgctcttccaaaccaaccgatcgcggacagcaatataaagacgggaaatttacccagcctttctctctggtgaaccagccagatgccgttggcgcgccgattaacgccggtgattttgccgagcaaattaaccatatccgtaattcgtcaccgcgtctgtatggcaaccagagtaatgtttataacgcggtgcaagagtggctgcgcgcaggcggtgatacccgcaatatgcgccagttcggcattgatgcctggcagatggaaggtgccgacaactatggtaacgtgcagtttacaggctattacacgccggtaattcaggcgcgccatacccgccagggcgagttccagtatcctatttaccgtatgccgccaaaacgtggtcgtctgccgtctcgtgcggagatctacgcgggtgcattgagcgataagtacatcctcgcttacagcaactctctgatggataatttcattatggatgtgcagggtagtgggtatatcgactttggtgatggcagtccgcttaactttttcagctatgcagggaaaaacggtcatgcctatcgcagcattggtaaggtgctgatcgaccgtggcgaagtgaaaaaagaagatatgtcgatgcaggcgattcgtcattggggcgaaacacacagtgaagccgaggttcgcgagctgctggaacagaacccgtctttcgttttctttaaaccgcaatcttttgcaccggtgaaaggggcaagtgcggtgccgctggttggccgtgcttctgttgcctctgatcgttccattatcccaccaggtacaaccttgctggcagaagtgccgctgctggataataacggcaaatttaacggtcagtacgaattgcgtctgatggtggcgttggatgtcggtggcgcaatcaaaggccaacacttcgatatttatcaagggatcgggccggaagccggacaccgcgcaggttggtacaaccactatggacgtgtctgggtgctgaaaaccgccccgggcgcaggtaacgtctttagcggc

SEQ ID NO: 210 - DNA, 66 bp, Escherichia coli
aaccatcaagcaggtcacggcgctggggcgtcgttttttaagcctgaccgccgatctgcgaaagat

SEQ ID NO: 211 - DNA, 165 bp, Escherichia coli
aggaggaaaaggcgttgctaccgcttttggtgccatcgcacccattggctgggatctcaccggagtaatggcgggaacctggttactgaccgtgctattgagcggatactcgtcgctgggagcgattgtcagtgcactgattgctccgttttatgtctggtggtt

SEQ ID NO: 212 - DNA, 153 bp, Escherichia coli
acgggaagacacaaagcatacgccagtgcgtggcttatatatgtggggcggtgtaggacgcgggaaaacctggctgatggaccttttctatcaaagcctgccgggagagcggaaacagcgcctgcactttcaccgttttatgctgcgggtgca

SEQ ID NO: 213 - DNA, 309 bp, Escherichia coli
atctgcatgcagccgaggtggaaggcgacagttttcaccgttacacccgcccggaaatggacatggcgatccgcaaagcgcgcgacgccgggcggcatatcagctacttcggccccgaagcgaacgacttcggcctgctggaacaaaccttcattgaatacggtcagagcggcaaagggaaatctcgcaaatatctgcatacctacgatgaagccgtaccgtggaatcaggtaccgggaacattcaccccctggcaacctttaccagaacccactgatgtactgttttatgaaggtttacacggcggcg

SEQ ID NO: 214 - DNA, 249 bp, Escherichia coli
aatatcgccacgccctcacctttgagcaacgcatccgcgtgcgtgcgcatatcgaagagttcgaaaaccgtctgcggattggctatcagattttcgatgccgaaacgggcaaacgcgccaccaccggatacaccattcaggtcgcggtcgacgagcaaagtcgcgaactgtgctttgtcagccccgatattctgtttgaacgcatgggagtcaaaccatgaaatttttaccgctgctggcgctgctgat

SEQ ID NO: 215 - DNA, 150 bp, Escherichia coli
ccgctgtcgctacaccttgctccgacaactgcgaaccccagggcagcgtattcgcagcctggcggtcgtcgtactggcgggaattatggtttgggcaccgattcgtttgctggatatccagcagaagaaagtggagagggcgaccggcgt

SEQ ID NO: 216 - DNA, 165 bp, Escherichia coli
ataaaccgatgcgtgtacgtgcgctgcatgcgcaaaaccagccaacagaaaccgccaatgccgggcagcgtatcgcgcttaacatcgcgggtgatgcggaaaaagagcagattaaccgtggcgactggctgcttgccgatgtgccgccagagccgttcacacggg

SEQ ID NO: 217 - DNA, 123 bp, Escherichia coli
gatgaacgcgtcgattgccaaactggagcagcaaaaagccgcccaggagcgcagcctcgccgcacaactggatgccgcattccgtcagggcgagcataccggtattcagctgattctcagcgg

SEQ ID NO: 218 - DNA, 171 bp, Escherichia coli
gctcgcatttcccagggagttacgcttgttaactcccagtcaattcacattcgtcttccagcagccacaacgggctggcacgccgcaaattaccattctcggccgcctgaattcgctggggcatccccgtatcggtcttacagtcgccaagaaaaacgttcgacgcgccca

SEQ ID NO: 219 - DNA, 138 bp, Escherichia coli
attgcatcagagcggttactctctctctggtggtcagcaacagcgtctgtgcattgcgcgtggtatcgccattcgcccggaagtgctgctgctcgacgaaccatgttcggcgctcgaccccatctccaccgggcgtat

SEQ ID NO: 220 - DNA, 183 bp, Escherichia coli
gaacgccgatctgtttggctggtttggtattggtcgtccgctgggcgtaccgacgccagtctggatcatggggattgtcttcctcgcggcctggtacatgctgcatcacacgcgtctggggcgttacatctacgcgctgggcggcaacgaagcggcaacgcgtctttctggtatcaacgtcaa

SEQ ID NO: 221 - DNA, 96 bp, Escherichia coli
caaagcggaaaagacctatattatgcgcgccgccgagcagacaatcttatgcggcgtggtgtcgatgggaaatccacattgcgtgattcaggtcga

SEQ ID NO: 222 - DNA, 159 bp, Escherichia coli
aagtgctggcgaaagccgatatcagttccgatcaaattgcagctatcggtattacgaaccagcgtgaaaccactattgtctgggaaaaagaaaccggcaagcctatctataacgccattgtctggcagtgccgtcgtaccgcagaaatctgcgagcatt

SEQ ID NO: 223 - DNA, 120 bp, Escherichia coli
tggataaaggcgagcagctggcctgggtctggcgcagcaaagcgcgctgtaacccgctatttatcgctactggtcatcgggtcagcgtggacagcgcgctggcgtgggtacaacgctgca

SEQ ID NO: 224 - DNA, 123 bp, Escherichia coli
gtggctgattgccgtggatttacagtgcggcagcccgtggaatgcggcagcgatgcttgcgatgcgcaatcctcgtctgcgggtaatcagcggactttctctgccgctggcgctcgaactggt

SEQ ID NO: 225 - DNA, 168 bp, Escherichia coli
caccggcgttggggcagcaaaaactttatgttctggtctttaccacggaaaaagatctccagcagacgacccaactgctcgacccggctaaagcctatgccaaaggcgttggtaactcgatcccggatattcccgatccggttgctcgtcataccaccgatggcttac

SEQ ID NO: 226 - DNA, 60 bp, Escherichia coli
aaaatcaaaatcatgctaaatgggaagtccataattttaccatgggctaccagcggcaag

SEQ ID NO: 227 - DNA, 129 bp, Escherichia coli
ccatttccgtttgccgctgctgttgcgggtttcagacaaacgcgtggaaccgctgccagaaagcgaatactcagcaccgctgcgtttccagctggccgatttcgctccacgcgacaatttcgtctgggt

SEQ ID NO: 228 - DNA, 279 bp, Escherichia coli
agtgacctccggcagctccgtgatggtggtgtgggaaggaacgcgtccgttgctggtggagattcaggcgctggtcgatcactcgatgatggcgaatccgcgccgcgtggcagtggggctggaacaaaaccgtctggcaatcctgctggctgtcttgcaccgtcacggtggtctgcaaatggccgatcaggatgtgtttgtgaacgtggtcggcggcgtaaaggtaaccgaaaccagcgccgacttagcgttactgctggcgatggtttccagcctgcg

SEQ ID NO: 229 - DNA, 123 bp, Escherichia coli
gcgtcgcctggggatcaccgcactggatatttatggcctgtcagaagtgatggggccgggggtggcgatggagtgtctggaaactaccgacggcccaaccatttgggaagatcatttctatcc

SEQ ID NO: 230 - DNA, 213 bp, Escherichia coli
gtgaagaggattacgcctggctggcgcagtatgacattgtgcacgcggcaatctggggacatgcggaagacgcattcccacagctgcacgctgcgggcaaacttaccgctttcgacttctccgacaagtgggacagcccgctctggcagacactggtgccgcatctcgattttgcctttgcctccgcaccgcaagaagacgaaacgctgcgtc

SEQ ID NO: 231 - DNA, 225 bp, Escherichia coli
cgcccacgttcaggtcacctttctggtggagaaactctcccccgcatggcagcgacgagtcgctctggttacccattccttaatcttatttatttgtggcgcactggcctggggcgcaacgctaaaaacaattcaggactggagcgattattcaccgatcctcggtttacccatcggcctgatgtatgccgcttgtctgcccaccagcctcgttatcgcattctt

SEQ ID NO: 232 - DNA, 1677 bp, Escherichia coli
atgactcaatttacgcaaaataccgccatgccttcttccctctggcaatactggcgcggcctttccggctggaacttctattttctggttaagttcggcctgttgtgggcgggatatcttaacttccatccgctcctcaatctggtgtttgccgcgtttctgctgatgcccattccgcgctacagcctgcatcgcttacgccactggattgccctgccgatcggctttgctttgttctggcatgacacctggttgcctggcccggaaagcataatgagccagggttcgcaggtggcggggttcagtaccgattatttaatcgaccttgtcacacgctttattaactggcagatgattggggccatttttgttttattagtggcctggttattcctgtcacaatggattcgcattaccgtttttgtggttgccattctgctatggctgaacgtacttaccctggcgggaccaagtttctccttgtggccagccggtcaaccgacgaccactgtaacaacgacgggtggcaacgcagcggcaaccgttgcggcgacgggtggcgcaccggtagtgggtgatatgcccgcacaaactgcaccgccaacaacggcgaaccttaacgcctggctgaataatttctataacgcggaggcgaaacgtaaatcgaccttcccgtcttcgctgcccgctgatgctcaaccatttgaactactggtgattaatatctgttcgctttcctggtcggatattgaagccgccgggttgatgtcgcatccgctgtggtcgcatttcgatattgagttcaagaactttaactccgccacctcctacagtggcccggcggcgatccgtttactgcgcgccagctgcgggcagacttcgcacactaatctgtatcaaccggcaaataatgactgctatctgtttgataacctgtcgaaactgggctttacccagcacctgatgatgggacataacggccagttcggcggttttttgaaagaagttcgcgaaaatggcggcatgcagaccgaattgatggatcaaacaaatctgccgattattttgctgggctttgatggttcgccggtttatgacgataccgccgtgcttaaccgctggctggacgttaccgaaaaagataaaaacagccgtagtgccacgttctacaacacgcttccactgcatgacggcaaccattatccgggcgtcagcaaaacagcggattacaaagcgcgggcgcagaaattctttgatgaactggacgccttctttactgaactggagaaatcgggtcgtaaagtgatggtggtcgtggtgccggaacacggcggcgcgctgaagggcgacagaatgcaggtatctggcctacgtgatatccctagcccgtctatcacagacgtccccgttggggtgaaattcttcggcatgaaggcaccacatcagggggcaccgattgtcatcgaccaaccgagcagcttcctggctatctccgatctggtggttcgcgttcttgatggcaagattttctccgaagacaatgttgactggaaaaaactcaccagtgggttgccacaaacagcaccggtctccgagaactcaaatgcagtagttattcaataccaggataaaccgtacgttcgcctgaacggcggcgactgggtgccttacccgcaa

SEQ ID NO: 233 - DNA, 1464 bp, Escherichia coli
atgatcaatcgtcaactttcacgtctgctgttgtgcagcattctcggcagcacgacgctgatttccggctgtgccctggtacgtaaggattctgcacctcatcaacagctcaaaccggaacaaatcaaactggccgatgatattcatcttgccagctccggctggccgcaggcgcagtggtggaaacaactcaatgacccgcagctggatgcgctgatccaacggacgctaagtggttcacacaccctcgccgaagcgaaactgcgggaagaaaaagcgcagtcgcaggccgatttgttagatgccggttcacaattacaggtcgcagcgttagggatgctcaaccgccaacgtgtctcggcgaacggctttttaagcccttatgcgatggatgcgccagcactgggtatggacgggccgtactatacggaagccacagtaggtttgtttgccggactggatctcgatttgtggggtgtgcatcgctcagcggttgccgctgccattggcgcgcataatgccgcgctggcagaaaccgcagcagtagagctatcgctgaccacgggcgtagcgcagctttattacagtatgcaggccagctatcagatgctcgatctgttagaacaaactcgcgatgtgattgattacgcggtaaaagcgcaccagagtaaagtggcgcacggtctggaagcgcaagtgcctttccacggcgcgcgggcacagattctggcggtcgataaacaaattgctgccgtcaaagggcaaatcaccgaaacgagagaatctctgcgcgcattgattggcgcgggagccagcgatatgccggagatcaaaccggtggcattaccacgagtccagaccggtattccggcgacactctcttatgagttgctcgccagacgcccggatctgcaagctatgcgctggtatgttcaggcgtcattagatcaggtggattccgcgcgggcgctgttctatccgagctttgatatcaaagcgtttttcggcctggattctatccacctggataccttattcaaaaaaaccagtcgccagttcaactttatcccgggtctgaaattgccgctgtttgacggtggacggttgaatgccaatctcgaaggcactcgcgccgccagcaacatgatgattgaacgttacaaccagtcagtgctgaatgcggtgcgcgacgttgccgtcaacggcacgcgtctgcaaacgctcaacgacgagcgagagatgcaggctgaacgcgtggaagccacgcgcttcacccagcgcgctgccgaggccgcctatcaacgcggcttaaccagccgcttacaggccaccgaagcccggttgccagtgcttgccgaggagatgtcattactgatgctggacagccgccgggtgatccaaagcattcagttgatgaaatcgctgggcggcgggtatcaggcaagtcccgtcgtcgagaaaaaa

SEQ ID NO: 234 - DNA, 192 bp, Escherichia coli
cggctccggctgtccagccagaccggtgacagtgcagtcatggtcacctcagggtgtccgagcacgccctgcgttttcagctcactgcgaatggcctgtgtcagtatggcctgttcccgtaccccgctgacctgtgccacgctctcttctccggctttcacgctggccgcaaaatctccggccagccgggca

SEQ ID NO: 235 - DNA, 270 bp, Escherichia coli
gcgatggaattaacgtgcgcccagttacggcctggccctacacccagagcgtcgccgaacggtgtatctggttccagttttgcctgttgtcctgcatgggcaaggtcaacgttaacgcaaactgcacctgcatccagcgcgccgagcagtgcatcgcgtttcggatcgaggatcttcgtcagatcccatacatctacaacgcgaccagatttatcgacttcgaggatatggtcacgaatggtggtgacgtgtacgccgtcatcgcgacga

SEQ ID NO: 236 - DNA, 282 bp, Escherichia coli
gccgggcggacaggttttcagccggggcgagtggctgaccatcatccgcgtgaacaaaagcaacggggcggtgagttcagtcacaacgccaaattacagttttctcgggtacagcggcacgatgaaagtgacgcccgatcgcatcacggactacaaagcaccatcggcagaagaggctgccgtcgccagtcaggccgcgaagcgtccgccggtagtcaactatccgggggaaggtttccgggaaatgacaaaggcgcagtgggccgccctgccccgggactg

SEQ ID NO: 237 - DNA, 234 bp, Escherichia coli
cgagcaaatcccaattattcttggctccgcaacgcccgcactggaaacgttatgcaacgtgcagcagaaaaaataccgcctgctgcgcctgacgcatcgggcggggaatgcgcgtccggcaattcaacacgtgctggatttaaaaggtcagaaggtgcaggctggtctggctccggcgttaatcacccgtatgcgccagcatttacaggcaaacaatcaggttatcctctttct

SEQ ID NO: 238 - DNA, 192 bp, Escherichia coli; identical to SEQ ID NO: 234

SEQ ID NO: 239 - DNA, 300 bp, Escherichia coli
gatgctccagcaatttccatgcgcgtttaccctgacgtcgggacatacgcaactgcaactgccagatatcgcgggttaacgtcgtcagacgtttcgggattgccagtgaacggcaggcttcgtccagcacgtcgttcatcgccagcgcgaaagcgtcgtgataggtcaggccgctttcctgggcgatcttctgtgccgtctccagcagtgggtaccagaacatggcggcaaacaggaacgccgggttcacgcgcatatcgttatggatacgcgtatcggtattcttcagcacctgttcaa

SEQ ID NO: 240 - DNA, 195 bp, Escherichia coli
cggacatcagacgagcgttcacataggcgcggtgcagtgcatcacgcattgccaggccgttcattacggtcgccagcatccccatgtggtcgcccacaacgcggttcatacccgctttcgccagaccagcgccacggaacaggttacccccaccaatcaccacaccaacctgaatacccagttcaaccagttctt

SEQ ID NO: 241 - DNA, 282 bp, Escherichia coli
cggcttttttctcgccgtgacgcgccagccggttgttcagcgcctgttggatcaggtagccaatgccgccctgcgtatctgccacacagttcgccagcggcgttaagggcagcccttcgcgctcgtgggcaatctccgcacggcgtaaatccagcccgacctgcggcccgttaccgtgggtcagcacaatgtcgtaatcggaagccagcatttccagcaccgtatcggccacggctttcaccgcctccgcctgatgctcaatcgactggctggcgttatctt

SEQ ID NO: 242 - DNA, 492 bp, Escherichia coli
gcgcgcttcggtaacgccacgagaacgcgccgcgttaacaataacgataccaaacaccattgcgcccagcgtatccatggtcagatagccgttgacgaagccgttagaaaacgcagcgttttgataagcctcagtcgccgtgctgatagaacccgccggccagacaatcgcggcaacagacaggatgaccagcgcgataattttcagcggcgcaaggaagttgcccacggtatccagcagcttgcccggatagagcgaaaccagaataacgatagcgaaatagaccaggctgtagataaacagcggcagcgcggaatcacccgtcagcggcgcaatccccacttcaaaagaaacggtagctgtacgcggcgtagcgaaaagcggccccaccgccaggtaacaaaccgttgccagcagtacgccagcgactttaccgattggcgtgctgaggctgtcaacaccgccgccaacttttgccagcgccactaccgt

SEQ ID NO: 243 - DNA, 633 bp, Escherichia coli
atcggaaccccagtcgaagttggtgaagccgatgtagctcagctgaccgccccacagatcggtaatcggcacaaagtatttaattttgaaacggtaaccgtcccactcgttttcgttcgctgcgccatagttctgccactggtatttcgcatagacgttcatggacaggctcatcggcaggccagtgtcgatatcggtacccagacccatgtaccaggtgctctggcgaccatctttattacgacccatgtcgtaaatgtagttgttcgcgaagtaccactctttgaacggaccgaagctaaggtcagtattggtcagcttgtcgatggagaaacgtggttcgatttccataaacagaggagaaccgtggttccagataccttttgcatcggagttaccgccgaagaataccggcgcatccgcataaccatagaagtcgaaccagtcttttttagcgaatgcttcgtactcaaggtaggtatcgttgcggatctgcggtccgaaacgggtgtgatagcttccgacaacgttaacgctctggtgccaccagtcggaaagatactgcggtttgtcgttttcagctgcgttgacagtaaaagacgaagagagcgccagtaccgcaccggctgccag

SEQ ID NO: 244 - DNA, 177 bp, Escherichia coli
gtattgctgatattcaccagacctgtaatcaccgccgtcagaataatccccggcgacaaagcaccgccactgccgagcgggaaccactgccagtgcaactcaccggagagcgaatgcgaagaaggaaagcaaaagtaccacaacaaccagccggttatggtgccgaccagcaggcca

SEQ ID NO: 245 - DNA, 363 bp, Escherichia coli
agcgttgctgattttgctctggggtcagtggggttatcagcgcctgattatcaatgtcatcaatcaccagccgggcgtagtgctgcgtcgcaggcatgtcatccagacgctggttcacataggccagttgtcggatcagtgccggatcgtccggtagccctttatgcgcctgttcgagcatttcccgcgactgtgcgatatcaccgctatcccacaaggcgtaaccaagcgctgcctgggtgttgctattattcggttccagttccagcgcggcgcgcaaatcactcaccgcggccgggacattatgacgttggcgataaattgtcgcccgcgcaacgtaagcgttggcagaaggcgcaatat

SEQ ID NO: 246 - DNA, 210 bp, Escherichia coli
ataccacattgttcctgctccttagtacagctcgttttcgttacggcggagagtttctgtcgtcatgcgcccccacattttgtagtagctccagagagtgtagagcaacacaatgggcaaaaatatcagcacgattaccaacataatactcagcgtcagctgactggaagtgctgtcccacaacgtcaggctggagattggactcacgct

SEQ ID NO: 247 - DNA, 87 bp, Escherichia coli
gcttcaccggttctggtgcagaagctgcagatgacgcagggtacggacatcctcccgggcctgttcgatacagggcaacagtgctgc

SEQ ID NO: 248 - DNA, 252 bp, Escherichia coli
gtcggggcgaaaatccccgagaacagcatcacgcagtgttgccagcatatgttggtcaataccacgtcctccgccctgatacgcctgagtggagagatcgtggcgatcgccaataacccaggtgccgttagccagcgcaggtttgatgaccgtttctaccagttgaacgcgcgcggcataaaacatcagaacttcggctttatcggtaatgatttcatcgcctaccgatttgatatccagcaccaggcttct

SEQ ID NO: 249 - DNA, 342 bp, Escherichia coli
atccgccacataccgttctttgttccagctaccgtattccgccgagacatcgcctttaaattcacgactggtcgcgtgttttcgaaccatattaattgccgcagatggattacccgtcccggtcatgagtcctgtcgcgccacgcactacttctacgcgttcaaacagtgccatatcagaaagtgcgtcgcccagattccagcgcgattcaaaataggtggggataccatcaaccatatagttatcgatctggaatccgcgggaataataaagagcacgatcggaatccgcctgacttttgctgatccccagcgtgttttccatcacttcgcccagcgtttg

SEQ ID NO: 250 - DNA, 414 bp, Escherichia coli
ctggcggtgacgttgatttctgcaaccgcagcaaactcaccattaccggatacgaccggaatgttgaccttgcctgcagcaacacctttcacggtgatggtcataccactgaccgacacggtggcttttgttttatccgcagacaccgcacggaagctcttgtcggttgcgccttccggctggaatgccacggtcagcgtcgtgctctgccctttcaccaccgaggtgctggcaggcgtcacggtcatgccggttgccgctgttaccgtgctgcgatcttctgccatcgacggacgtcccacgttggtgactttcaccgtgcgggtgatcacttccttcgccgtcaccgccttaccgatactgctgacccagccgcggaacacatcgaccgtgccgttcgggaagcggatttta

SEQ ID NO: 251 - DNA, 180 bp, Escherichia coli
ttggcatgccgacgctggagtaggcatccatcatctgttctgaggttatcacttcaatctggtgcgggtaggtatccagccggtagagtttcgccacccggtctatctctgccagataaacatccagcaggtcgaacgtccagtcgggtccatcgctcaaacgtgtggtgtccttattca

SEQ ID NO: 252 - DNA, 123 bp, Escherichia coli
catcgccagtttctgcgcctgttcgacaacatgcttcattttcgggctgacagcgacaatttgactgaaggcgctgacgtcctgggcggcgacattttgcaactgacggcccatacgaatcgt

SEQ ID NO: 253 - DNA, 318 bp, Escherichia coli
aggccggagaagccagcaccagcccgcgaattgcaggcgcataatcatgaacccatgtggcaaccagcactgcgccgacgctctgcgcgatcactaccacctcttccagcccgacctggctgtcgctggcagcaaaacggacaaactcatcgacatcccgcactgaacgcgcaagagatgggctataaccacggggccccgaagtttgtccatgccctcgggcatcccatgcataaaaagcagtatctggcatcgccagttcatcaacgatatgttgtagacgaccagaatgttcatgaccgcgatgaaataagacga

SEQ ID NO: 254 - DNA, 114 bp, Escherichia coli
tcgcgcccagttcttcgagcagacgcacgccatcctggatattgcgtttatccggtgcttcgacaaacgggaacgcagcgatatcgcctagccccagcgcggtcatctgcaaaa

SEQ ID NO: 255 - DNA, 135 bp, Escherichia coli
cggtacccaaatccatgcggcattcgccagcgacatcaccgaaccgtcggcctgcggtactccattgacgccgagaaaggcaaatacgggtacaaaaatgaccagcggtgcaaccagctgcattacacttacacc

SEQ ID NO: 256 - DNA, 66 bp, Escherichia coli
aaaatcgaacatatcttatccttatgcctggacagtatgcatcagaccggccatttcatcttttac

SEQ ID NO: 257 - DNA, 501 bp, Escherichia coli
cgcaatggcattaccgcgaaaaggtgccgggacatcagccacagcaaggcgttcgcggatggctgcgaagagaaccatcaccagcgaaaaaccgacagcggcggaaaaaccgtacagcgccgactgcaagaaattgtgcccgagattgatattcagcaacgccacgccgagcacggcacagttggtggtgataagcggcaaaaaaatccccagcaaacggtaaagcaccgggctggttttgcgcaccaccatctcggtgaactgcacgaccacagcaatcaccagaataaatgccagggtgcgcaggtaaatcagattaagtgggatcaaaatccacgtatcgataagccaggcgcaaatagacgccagcgtcatcacaaacgttgttgccagccccatgcccatcgcggtttccagctttttggaaacccccataaacggacagagaccgagaaacttgaccagtacaaagttattgaccagtacagttccgacaaacag

SEQ ID NO: 258 - DNA, 675 bp, Escherichia coli
aaaagcaggccagctaatctatcgctgaacacatttgtcggatgcggcgcgagcgccttatccgacctacggttcgctatctctggtaggcctggtaagacgcgaacagcgtcgcatcaggcacactgccaatgtcggatgcggcgcgagcgccttttccgacctacggttcgctatctctggtatatgcctgataagacgcgaatagcgtcgcatcaggcacactgccaatgtcggatgcggtgcgagcgaccaatccgacttacggcatttctggcggcgttatgccaaagtgattccacgcccgcgtcgtcgccatacgcccacgcggtgtacgctgcaaaaagccttgctgaatcaaataaggttccagcacatcctcaatggtttcacgttcttcgccaatggctgccgcaaggttatccagacctaccggcccaccaaagaacttatcgattaccgccagcaacaatttgcggtccatataatcgaaaccttcagcatcgacattcaacatatccagcgcctgagcagcgatatctgccgagatggtgccatcgtgcttcacttcggcgaaatcacgcactcgacgcagcagacggttggcaatgcgcggcgtaccgcgagcgcgacgagcaacttccagcgcgccgtcatcactcatctcaagcccca

SEQ ID NO: 259 - DNA, 477 bp, Escherichia coli
ttacggctcaggcgctgccagagctgcgtgattcggctgtccgggcgggtatccggtttgcgtacaatttcaaatccctgcggtgcaatgatgctgccgtcaacgtacagactgccgccccgtaacaggtgctgcatctgttgttcaccgatatgcaggccgagagattcagcagactcccgccattctttagcgagtaattcgtggttatcaggcaaaggccgctgctgtttgcggctctgtgtccagctctgcatttcatcactgctgttttttgcctgtttgtcacgaagcgaacgcatcagcgcccggcgttcgtgccgtttcagtgagcgcatccattcgttcacgtcaacgccgtcaggaagctgcggccacggtgctggccgttcttccggctgttctgtcccgttgttgtccgtttcctgtacacggggacagttattgccacgagtccaaggggcggcagggccgccc

SEQ ID NO: 260 - DNA, 153 bp, Escherichia coli
catgtggcatacacaaacgcgcgcagtttacccgcaatcacgcacagggattttgttaccgcctccgtgtccagctccggcgcggccagaatacgcggacggtatccgatgctttcatcctgctctgcaacaagcagcgcatacatccccgta

SEQ ID NO: 261 - DNA, 108 bp, Escherichia coli
gcatcagactttcctgttgctgcatatccactaaaagatactaaacaaaggcagattgccattaataaaccacatcgcataccgatacactcaattactaaccaatca

SEQ ID NO: 262 - DNA, 198 bp, Escherichia coli
tgcagcggcgcaataccatgtaccacaatcccgccgccgacgaggaacatcgccagcgtgccgacaatcgataacgctttcatcagccagggcgcgataatcaataatcctttacctaatgcctgcatcagcgcgctggatttttccgccagccaataccccaggtcatcaatcttaacgataaccccgaccagaccg

SEQ ID NO: 263 - DNA, 213 bp, Escherichia coli
gccactttcatgctgttcacttcgttaaacccctggcgcaaaatgccttccgtcgaggctgccactttcagcgcagtggcagaaaaagccgaagtgtatttttcaaacatcgcgcgtttatcgagcaatatacgcataaacagcgccgcgccgacggtattggtgaccatcattggcgcagcaatattactcaccagacgcaccgcatcttca

SEQ ID NO: 264 - DNA, 165 bp, Escherichia coli
tcaccttttgctgattaccacctgagagcgaaccaatttgcgtccgatgccccggtgtttttacccgcatcgaatcaatcacccactgggtatcgcttttcatccgcgagttatccagtaaaccaactttatttttgtagttgcgaatattggaaattaacgagt

SEQ ID NO: 265 - DNA, 339 bp, Escherichia coli
tccctgatgcagggtgttccaccactccacggagtaatgaataatcggcagattcaccacgccaatcagcaccaggatacctgccgcacggcccgccagacggcggtcgtcgaaggcgtgccacagggcaatcacacccacatacaaaaacagcagcaccagttcagaagtcagacgtgcatcccatacccaccaggtgccccacatcggttttccccatgcagagccggtaaccagggcaataaaggtaaacacggcaccaatgggggccatcgccgccaccgccaggttggccattttcatctgccagacaaggccaataaacgccgccaccgccat

SEQ ID NO: 266 - DNA, 102 bp, Escherichia coli
tcggaccaacggaaaacgcgttatcctgataagcaaacgtcacgttacgcagctccagcgtttgccagctgggaaacgcctgcgggcgcggaaactctgctt

SEQ ID NO: 267 - DNA, 342 bp, Escherichia coli
aggaacagacgcatcaccacaccgaagatagcgattttgctcgccgtcgccaggaaagtggaaaccggcgcaggcgcgccctggtatacgtctggcgtccacaggtggaacggcaccagagagagtttgaagccgaggccaacaatcatcaggccgaaacctgccagcaacagcggctcgtttagcataccgtcgccgaggtttttacccagcgcgacaaacgacaggtcgccagactgcgcatacaccagcgccataccgaacagcaggaaagaagacgctgcggcagaaaggatggtgtatttgatactggcttccagcgaacgtttctggcggaaagcg

SEQ ID NO: 268 - DNA, 477 bp, Escherichia coli
cagaacgcaggagatagaaccgataacttcaatggcgcgcatcacctcaccgggtttatcgccaggggccataaagataggatccagaccggggatcagttcccagccaagcaggaatttcactaccgcagcggcaagaccgagggtgatcaatgcaacgaggaatttggcgaagatctggaagccgttgatcattttttctgggatgaatttcagccccagcgccaccagaatcgcaacaatgatcaccgggatcatgttcatcaggatcagggcgaaagtgaattccaccggctggccgttgatctgaacaccggagtacatagcaaccagaccaccagcgatacaaccaatcggaatggtcacaatgcccgccagcacgccgagcgccagataacgacggtcagaaggttcgataatgccgagcgccaccggaatggaaaacacaatcgttggccccatcatcgacccgagaat

SEQ ID NO: 269 - DNA, 561 bp, Escherichia coli
cccacttcggctcccagcttttatgccagcatagcgatttcctggttatctgcctctccgccctgccccaccaccaacacccgtctggcctcagctaatgggtcgcgggtaacatttttcaggttctctatgctaaccagccagtccggaagcgcacctgggactatgttcagttgctgcataccagagggcaacgtggcatttttatctgctcccgcctggcgcgccagggaaagacatagcgggcgtttttctgtttgcagcgtcgccgttagcgcatttccccagtgggatttgcgcacgcttacgattggaatctctaacgaagtcacctggcagatgcttgcaccatgtaaacgccaggccagccgagtcgacagttcatcgccaaacgttcccggcggaaagagaacaacgttcgcaggcgttcgctgccactgttccaccagcgcatccagcacctgttccaccactacgggctgtggttctatttgccagtgcgccagggtacaaccgctgaaatcctgcgccgccagccagcccgctaatgcggcattctcc

SEQ ID NO: 270 - DNA, 417 bp, Escherichia coli
gcggaagcatcaccgatatccaggatctgctcgtcagctttcacgtcgttaacagatttcagggtagccggagcggtttcagagaactcggttgctacgcgaacatcagacggaaccgggatgttgcaggtggtcagcagacgttttgcttcgtcaaccaggtcagcttcgtacagggatttacccacatcgtggccttgtgccgcgataaaggtgttagcgataccaccaccaacaatcagctggtcagcgattttagacagggagtccagaacggtcagtttggtagatactttagaaccaccaacgatagccaccatcgggcgagcaggttctttcagtgccttacccagcgcgtccagttcagctgccagcagcgggcctgcgcacgcaacgtcagcgaatttaccgataccg

SEQ ID NO: 271 - DNA, 120 bp, Escherichia coli
gccaaggaacatcgggatctctgcgccgacgatcacaccaatagtacctattccgcccatgaccgcgccgcgtttaccgccgaccagatgaccaccggtagaaccaatcatcacgggcaa

SEQ ID NO: 272 - DNA, 570 bp, Escherichia coli
agagcgcgactgcagcgacggttcgcgcccgccgcgaatgagctggaacacctgaacgataaattcaatttcgcgaatgccgcctgcgccgagtttgatattgtcggtcaaaccacgtcgacgcacttcacgggcaatcattcctttcatgttgcgcagcgactgaatcacgctgaaatcgatgtaacgacggaaaacaaacgggcgcagcatcgcacgcaactcgttagcatagacgccttcgctatcgcccataatccgcgccttgaccatcgcgtaacgctcccagtcgcgcccctgctcctggtaataatcttccaacgcggcaaagctcagcaccagcgggccactttcgccaaacggacgcagccgcatatccacgcgatagacgaagccatcctgcgttggttgatccagcactttaatcagccgctgccccatgcgggtaaaaaactgcgcgttatccagttcccagcgtccaccctgcgtacaaccatgttccggccaggcaaaaatcagatcgatatcagaggagaaattcagttccccgccgcccagcttacccatgcc

SEQ ID NO: 273 - DNA, 144 bp, Escherichia coli
actcaagtaacgcttcgtaagtcaggcgtgagtcaacgcgaatgcggtccagttcggcatcggcgaaatcacgcagaacacgctgcgccaacgccagttcgccgtacagctgataacgggtctgcgggcgctttttacgctcca

SEQ ID NO: 274 - DNA, 387 bp, Escherichia coli
cgcggatcggctacgcaaatacctggcgcgttttggtctgacgtgggaagccgtgcaggatcagcacagctccagttgaatatggtggtccgtcagcacctgcatcacgcttactggcggcggggtgtcggtgtagacggcatctaccatgctgatgctacccatattgaccatcgcgttacggccaaatttcgagtgatcgacaaccagcataacgtggcgcgagttctcaataatggcgcgtttggtgcgaacttcgtggtaatcgaactccagcagcgagccgtcgctatcgatgccgcttatccccagaatgccgaaatcaaggcggaactgggagataaaatcgagcgtcgcttcgccaatgatcccgccatcgcggctgcg

SEQ ID NO: 275 - DNA, 318 bp, Escherichia coli
ccgaaggatacactctggagtcgactccagagtcaagttttatcagagatacagcgagcggacgatgaggaagtgaccggcaaagtagcaggccgcagcaatcgcgttgtccgcacggaagcgtcggcgatagtgactacccagccagacaaagttactgataaacagcaacgaagcgccgacaaacgcagagagtgccggagcggtcggacggaagaaccacagttcacctgccagccacaccatcaccagcgtcatgccgataaacgtgcagataggccaacgatactcttccagccgcgtccagataatcgccag

SEQ ID NO: 276 - DNA, 210 bp, Escherichia coli
cgacgagatgacgtaggagatcagcaatgccgggatcatcaccgcaaagatgatacgacgggccagcggtgcgccaaaaatacgtacggtcaggtcggtagcgagaaagataaacggaaagctaaacgcgccccaggtggtatggaaaccaaaaatggagacgggaagctgaaccagatagttactggaggtgatcaccagcagatgaaa

SEQ ID NO: 277 - DNA, 360 bp, Escherichia coli
catcagcggatcgttttgcagctccttgccgcttacgccggagaatgcggaataaagctgggagaggatccactgtgcctgcgcttcgccgccgttttgcaggcgggcgcgggtgttggggtcaatcaggccgttgcgatgctgccagaaaaacgctccccacgcctgctggctggcggcatccattggccctttaacgtcgccgagcgcagcggatttttgcagcagcgtcagccactcctgagcgaccaaaggattagcctctttaccggggctgaccagccacaccagttggcggtcaagacgctgcataaagccgtcattcagcgccggaggaatatcgcccatcgtctgtttggg

SEQ ID NO: 278 - DNA, 228 bp, Escherichia coli
gatgccgaaatcaagatgcagcgccttccacaaccaggtgccgtactgcacatacagcggctgatccagtcccagcatggtgcgggtagaggccagcatctccggcgtcggcggcaggttagacagacgcaaataatcgagcgccgggtcgccggtaccgaggcgcagcatcagaaaaatgatcaccgaggcggcgagcaccatcgggatcagcagcagaaagcggcg

SEQ ID NO: 279 - DNA, 75 bp, Escherichia coli
ggccaaattgttcggcaatcttataaccaaacggcgacgcgcccaggcccggcattgacagcccgccggtcgcga

SEQ ID NO: 280 - DNA, 441 bp, Escherichia coli
ttagccatgaaagtccccttaagcctgcaacgttattgtttcgattcggtgctggcgttttcctggctggaggaaattgctcgtgctttgatacccggacgaatgcgttgcaaaccggaaacgatcacccgatcgccagcctgcaagccagaggtgacaacccactggtcgccgatggctttgctggcttcaatttcgcgtagcttcacgacatcgtctttatccagaatgagcgccgttgctttaccttgggcgttgtgggtgacgccttcctgcggcaccagtaatacattctggcggctaccttcatccactaatgccgtgacatacatgccaggcagcaagtcaccatttgggttggggaaaatcgcccgtaacgtcacggagcccgtggtttcatcaaccgtcgggtcggagaatttcagcgtgccggtctggctg

SEQ ID NO: 281 - DNA, 261 bp, Escherichia coli
tcaacgttgaacaccagttcctgcggcagcgcttcttcatcacgccagatcacccagccgcagcccagcggagccagaccgaatttatggcctgaagcactgatcgatttcacacgcggcaggcggaagtcccagacgatatccggggcgacgaacggtgccaggaagccaccgctggcagcgtcgatgtgcatgtcgatgtcgataccggtgtcggcctggaatttatccagtgcatcgtgcagcggttgcgggaactca

SEQ ID NO: 282 - DNA, 546 bp, Escherichia coli
gggggctcaaacgactatgccgcattccctttcgccatcggagccagtgccgtaggcaactctttacccagcccctgcaccagcgaatcttgcgtaatttcactgatcgatttcgcgccagtcagcgtcattgccactttcatctctttctcgatcagatttagcaggttagctacacccgcctggcccgctgttgccagcgcatacaggaaagcacgacccagcagtacggtgtcggcaccgagcgcaatcatacgcacgacatcaagcccgttacgaattccgctatccgccagaatggcgatatcacctttcaccgcatctgcaatagcgggcaacgcacgagcggaagagagtacaccgtccagctggcggccaccgtggttagaaactacaatcccatcagcaccaaaacgtactgcatcgcgcgcatcttccggatcgaggatccctttgatcaccatcgggccatcccagaaatcgcggatccactcaaggtctttccatgagatggacggatcgaagttattccccagccagccgatg

SEQ ID NO: 283 - DNA, 225 bp, Escherichia coli
gcgccacgatacgcggcacggcaagttgtaaagaggattcgccgcgcagcaccgggcgcgcggcctctgtcagttgtagggcagaatgctgggcaatattttgcgtcaccaggccgaggtgaatcagctggcggatcacgctcacccaatgttcatggcttttatcacggcccatgccatagactttcagtttgtcatgaccatagtcgcggatacgctggttat

SEQ ID NO: 284 - DNA, 489 bp, Escherichia coli
ccacgcatcaacggcaatcatcgcccgtttgataatgtcggcggcggttccctgcattggcgcgttaatggctgcacgttcagccgctgcacgacgagcaccattgctggatttgatatccggcagatacagacggcgtccgtccagcgtttcaacgtagccctgctctttcgcctgagcacgggtgcgttccatatactccagcacgccagggtagcgttcgaagtaaaggtccatgtacttctgcgcttctttacgtggaatgttcaattgccgcgccagaccgaaagcactcatgccataaatcagaccaaagttgatcgctttcgcgctacggcgttgctcgctggtgacggtttccagtggcaaaccaaacacttctgccgccgttgcccggtggatatcttttccttccgcgaatgcggtcagcaagcctttgtcacgcgagagatgcgccataatgcgcagttcaatctgcgagtagtccgc

SEQ ID NO: 285 - DNA, 438 bp, Escherichia coli
catcgttggcgttgttcaggtcatcgagagtttcaaacagcggagcaaccggcatcgcaaacccgatacccgcttctttcagcagcaggtggacagccagcacgtcggacggcgttttcgccatcgagatcacgtaggcggcaatggagccttgcggtgcttcggcaatcacctggcaggtatcgagcacttcgcgcgtttcggcgcttggttgccagttgcgcggcagaagcggacgtttggagttcagttcgcggatcaggaacgcctgtttgtcggcctctgaccagctttcgtagtcgccgataccgaggtagcgggtcagctcgcccagcgcttcggtatgacgcgtgctctcctgacggatatcaatacggaccagcggtacgccgaaacatttcacgcggcgcagggtgtcgagcagatcgccgttggcga

SEQ ID NO: 286 - DNA, 222 bp, Escherichia coli
gaagagcgttcagagctggtggcaatccatgcgcccaacaggaaaatcggtgccagcacaaacagcaattcgacaatattgtccagccagggcatgaccagtagcgtgaataacagcgccagaatcgcgccgcaaaaggccccgccaaaacgcagcaccatcttctggtacgatgaaccgacattcggattagcgacgatcacgcaggtcagcatacaggtg

SEQ ID NO: 287 - DNA, 297 bp, Escherichia coli
cgccatcaccaatcgcgaccgccagcggataaggccacgcctcgcgcaagccgtaacccagcgtcatccacagcaccggcagcggtgacgcgacgagaatcgaccagaaaagagtgcgcaacgtcagccagaagtgatcctgagtcactttgccgactttcgccgccgaacgttcaagaaaacgggtgaaatagcggcgcgagtaaatactgcaaccgaccagaatcaacgcgccaaacagcggcaaaatcgtctctttgctggtcagcatcatcacactggctttgcccaactgac

SEQ ID NO: 288 - DNA, 222 bp, Escherichia coli
tcttctggaactcggccagcatcgggtcgaccacgtcaatggcattaccctgctcatccacgccctgggtgtaacgcatccagccagccacgcccagcgccaggtgacgccagctgccgccgttttgcaggtgcagacgcaccgggtccagcagacgctgcggtaacttctggctgccgtccatcgcaatctgccaggtacggtgacgcagagacgggttgc

SEQ ID NO: 289 - DNA, 120 bp, Escherichia coli
gtatcagtccgtcatcacgtagctgtaagcggatatcagaaggcgctttccagccggggccgaaaacgcccaccggtgcaggcgtcttcgtccggtagctgctgtaggtgcgggagagaa

SEQ ID NO: 290 - DNA, 225 bp, Escherichia coli
aggtttcgtacatggcattttgttcagttaaatgccagcactcttctactctggcacgcagtgctgcgcgagaaagcgccagtggtatttgcgcttcaaaacaaatcacgttatccgccacacccgcttcatgcaaaagtgtctgtacatcggccagtttttgcgacggcgatgccatcaggctgggtgccagtgcgccaaaaccttgccagatcaactgctttt

SEQ ID NO: 291 - DNA, 165 bp, Escherichia coli
ctgcgcactcgacatttcaccgtgaaactccgccatttgttggcgcagcatgattgggtaacgccaaatcaccacattcaaaaaactgccgatgatcaatcctccgacggttgccaggacgggcatcgccgtggggtattgctgaaaaacatcaaaaagcatggt

SEQ ID NO: 292 - DNA, 324 bp, Escherichia coli
atgagcgtcacaaagcctaaaagattgagatttcccggtacgctcagttggcgggcgatagtcatcaccagagatgtcgtgcccataaaggtaccgccaaaaccaagactgctgatgataagcaagagaggcgagtcgctggcgagagtaagcagcacacagatagcctgcaccagcaaattcgccgtcaggcagggcaaagccccccaacgttttgctgcccatagccagccaaagcaaccaggcacaattgataagccgactaacgtccagagatgggcggttaacaatggtgagcctgcatctttcgccatgagcggcagg

SEQ ID NO: 293 - DNA, 1311 bp, Escherichia coli
cagtgcgatcaggttttgtggagttattgtcatggcgatttacggccttgtagtagtaacggaattaacaaaccactgctggatattgccaatcgcggaatgcgaggtatccagaatcggctgcggatagaagcccagcagtaccagcagcaccaccagcaacaggatcataaacagctcacgcagcgacatccctggcagttcctggctggcaatctggcttttcgctttaccgaagtaagcgcgatgcaacatcgccagcgaataaacagatgcaaagaccagcccaaaggtagagataacggtaatcaccgggacaacctggaagctgccgaacagaatcataaattcgccgacgaagttaccggtgccaggcatcccaagcgttgccaccgcaaagaacagcgacagtgctggcagccatttcatcttgctccacagaccgcccatcatgcgcatgtcgcgggtatggatacgttcataaagctgaccgcagagaataaacagacccgctgccgacaagccgtgcgcaatcatctggattaccgcgccctggtaggccaactggctgccggtatagatagcaatcagcacgaagcccatgtgggaaaccgaggtgtaggcgatcagacgtttgatatcggtctgggcgaaggccatccacgcaccgtagaagatgccgataacacccagccacatggcgattggcgcgaactctgccgacgcgttcgggaacagcggcagggagaaacgcagcagaccataagcagcggttttcagcaagatccccgcgaggtccacggaaccggcggtcggagcctgggagtgcgcatccggcagccagccatgcagcggtaccaccggcattttcaccgcaaacgcgatgaagaagcccagcatcagcaaatattccacgccgttagacattggcgtattcagcagctcttcatagttgaaggtccagacgccagtcgcattgtagtgaacaaaaaccagcgccaggatggcgatcaacatcaccagaccactcgcctgggtgtaaatgaagaacttggttgccgccgtgatacgcgttttaccgtcagaggctttatgcccccacagtgcgatcaggaagtacatcggcaccagcatcatttcccagaagaagaagaacaggaacatgtcgatggcaaggaacacgccgataacgccgcccaggatccacatcaggttgaggtggaagaagccctggtatttttcgatctctttccacgaacagagtaccgccagcacaccgagcagaccggtcagcacgaccatcagcagcga

SEQ ID NO: 294 - DNA, 135 bp, Escherichia coli
cgggaggcaccagcgcggcgagcggcagttgccagccgctttcatcctcggccattcggtttagcaatgcgcaatactgttcaaactggcgctccacctgcccggcaggaaacagcgcggcgacaaaatcccagt

SEQ ID NO: 295 - DNA, 117 bp, Escherichia coli
gcttcctgcttcgccttaccgtggcagcggacgacggcagtgagcggctggtcagcatggcccggacgacggaaaccacataccgcttcaggcaactggcgctggggcgttacacgc

SEQ ID NO: 296 - DNA, 294 bp, Escherichia coli
ggatggttcagaggcggacggtgcgacggcgaacacgctgcgggcgagggtgaccgatgcgttcggcaatgcgcttgccggacagacggtcagcgtgacggcagacaacagcgcaacgttgtctccgacggtcatcacagggccggacggcacggtggagatcagtgtcaccagccagacggcgggagccagtacagtcactgccagcatcaacagcagcagccagagccggaacgtcacgtttatcgccgatgtcaggacggcgcagatcgcgagtctggaggtgaggcagga

SEQ ID NO: 297 - DNA, 183 bp, Escherichia coli
acatacggatgcgcttcaccgtcacgtaaaccacgggttatgccgctggtcaccgcccaggtgcccatcaccgcattaagggtaaattcgtcttcgatcccggcacagagtgcggtggaaaccacatcaaacaggccgccgacaatgggcgtacccgctttcagaccggtcagtgcggctgtc

SEQ ID NO: 298 - DNA, 321 bp, Escherichia coli
aaaatcgccaccagagggaacagtgcaaaagctgaaaccaccggcgagcttaattcccccagactacctaatacatccaccggtagcgcggtcagcagctggtttactggcaacagacaggtgaggatcaacacgccccagatagcgccaagaccaaacgccatcaggctgtttatcgccagtacgccgaggatatcggtaggaagaaagagtaaccatgcgttgagcagcccggttttcagggtaaaagagatccccaccgaggccacaaaaccaatgctcagaccaaaagcgatactccccgcctcgcgacggttcata

SEQ ID NO: 299 - DNA, 90 bp, Escherichia coli
acaacgagtggttatttgccagtgagcgccttgatggctgccacatcttccagcacacagtcaaaacgatggaaagccagaaatgccacc

SEQ ID NO: 300 - DNA, 426 bp, Escherichia coli
acctgtattgtggctttgctattactgtctgttaccgtttcacaaggtaatctcttatccgggcgcaatagttctggtactttttccagctctcccagtgtggcactcaacgcgacacggggaactggattcaactggcgtcccagcacatggtcaattctgttaagcagagaaagcagctgtataccacgctctgagccaataaaagcatggaactcatcaataacaatgtatgccacagaagaaaacgcctgtttgagccaacccaatgagtttatgagcaaagactcaagtgattcaggtgtgataagtaagatgccagaaggggttgtccgtgctttcttctttttgctttgtggtacatccccgtgccagggcgtcacttgcatttccagggcttcaccaagactctcaagacgacggtgt

SEQ ID NO: 301 - protein, 638 aa, Escherichia coli
MGKIIGIDLGTTNSCVAIMDGTTPRVLENAEGDRTTPSIIAYTQDGETLVGQPAKRQAVTNPQNTLFAIKRLIGRRFQDEEVQRDVSIMPFKIIAADNGDAWVEVKGQKMAPPQISAEVLKKMKKTAEDYLGEPVTEAVITVPAYFNDAQRQATKDAGRIAGLEVKRIINEPTAAALAYGLDKGTGNRTIAVYDLGGGTFDISIIEIDEVDGEKTFEVLATNGDTHLGGEDFDSRLINYLVEEFKKDQGIDLRNDPLAMQRLKEAAEKAKIELSSAQQTDVNLPYITADATGPKHMNIKVTRAKLESLVEDLVNRSIEPLKVALQDAGLSVSDIDDVILVGGQTRMPMVQKKVAEFFGKEPRKDVNPDEAVAIGAAVQGGVLTGDVKDVLLLDVTPLSLGIETMGGVMTTLIAKNTTIPTKHSQVFSTAEDNQSAVTIHVLQGERKRAADNKSLGQFNLDGINPAPRGMPQIEVTFDIDADGILHVSAKDKNSGKEQKITIKASSGLNEDEIQKMVRDAEANAEADRKFEELVQTRNQGDHLLHSTRKQVEEAGDKLPADDKTAIESALTALETALKGEDKAAIEAKMQELAQVSQKLMEIAQQQHAQQQTAGADASANNAKDDDVVDAEFEEVKDKK

SEQ ID NO: 302 - protein, 405 aa, Escherichia coli
MDHLPMPKFGPLAGLRVVFSGIEIAGPFAGQMFAEWGAEVIWIENVAWADTIRVQPNYPQLSRRNLHALSLNIFKDEGREAFLKLMETTDIFIEASKGPAFARRGITDEVLWQHNPKLVIAHLSGFGQYGTEEYTNLPAYNTIAQAFSGYLIQNGDVDQPMPAFPYTADYFSGLTATTAALAALHKARETGKGESIDIAMYEVMLRMGQYFMMDYFNGGEMCPRMSKGKDPYYAGCGLYKCADGYIVMELVGITQIEECFKDIGLAHLLGTPEIPEGTQLIHRIECPYGPLVEEKLDAWLAAHTIAEVKERFAELNIACAKVLTVPELESNPQYVARESITQWQTMDGRTCKGPNIMPKFKNNPGQIWRGMPSHGMDTAAILKNIGYSENDIQELVSKGLAKVED

SEQ ID NO: 303 - protein, 968 aa, Escherichia coli
MPFTLGQRWISDTESELGLGTVVAVDARTVTLLFPSTGENRLYARSDSPVTRVMFNPGDTITSHDGWQMQVEEVKEENGLLTYIGTRLDTEESGVALREVFLDSKLVFSKPQDRLFAGQIDRMDRFALRYRARKYSSEQFRMPYSGLRGQRTSLIPHQLNIAHDVGRRHAPRVLLADEVGLGKTIEAGMILHQQLLSGAAERVLIIVPETLQHQWLVEMLRRFNLRFALFDDERYAEAQHDAYNPFDTEQLVICSLDFARRSKQRLEHLCEAEWDLLVVDEAHHLVWSEDAPSREYQAIEQLAEHVPGVLLLTATPEQLGMESHFARLRLLDPNRFHDFAQFVEEQKNYRPVADAVAMLLAGNKLSNDELNMLGEMIGEQDIEPLLQAANSDSEDAQSARQELVSMLMDRHGTSRVLFRNTRNGVKGFPKRELHTIKLPLPTQYQTAIKVSGIMGARKSAEDRARDMLYPERIYQEFEGDNATWWNFDPRVEWLMGYLTSHRSQKVLVICAKAATALQLEQVLREREGIRAAVFHEGMSIIERDRAAAWFAEEDTGAQVLLCSEIGSEGRNFQFASHMVMFDLPFNPDLLEQRIGRLDRIGQAHDIQIHVPYLEKTAQSVLVRWYHEGLDAFEHTCPTGRTIYDSVYNDLINYLASPDQTEGFDDLIKNCREQHEALKAQLEQGRDRLLEIHSNGGEKAQALAESIEEQDDDTNLIAFAMNLFDIIGINQDDRGDNMIVLTPSDHMLVPDFPGLSEDGITITFDREVALAREDAQFITWEHPLIRNGLDLILSGDTGSSTISLLKNKALPVGTLLVELIYVVEAQAPKQLQLNRFLPPTPVRMLLDKNGNNLAAQVEFETFNRQLNAVNRHTGSKLVNAVQQDVHAILQLGEAQIEKSARALIDAARNEADEKLSAELSRLEALRAVNPNIRDDELTAIESNRQQVMESLDQAGWRLDALRLIVVTHQ

SEQ ID NO: 304 - protein, 566 aa, Escherichia coli
MAIAIGLDFGSDSVRALAVDCTTGEEIATSVEWYPRWQKGQFCDAPNNQFRHHPRDYIESMEAALKTVLAELSVEQRAAVVGIGVDSTGSTPAPIDADGNVLALRPEFAENPNAMFVLWKDHTAVEEAEEITRLCHAPGNVDYSRYIGGIYSSEWFWAKILHVTRQDSAVAQSAASWIELCDWVPALLSGTTRPQDIRRGRCSAGHKSLWHESWGGLPPASFFDELDPILNRHLPSPLFTDTWTADIPVGTLCPEWAQRLGLPESVVISGGAFDCHMGAVGAGAQPNALVKVIGTSTCDILIADKQSVGERAVKGICGQVDGSVVPGFIGLEAGQSAFGDIYAWFGRVLGWPLEQLAAQHPELKEQIDASQKQLLPALTEAWAKNPSLDHLPVVLDWFNGRRTPNANQRLKGVITDLNLATDAPLLFGGLIAATAFGARAIMECFTDQGIAVNNVMALGGIARKNQVIMQACCDVLNRPLQIVASDQCCALGAAIFAAVAAKVHADIPSAQQKMASAVEKTLQPRSEQAQRFEQLYRRYQQWAMSAEQHYLPTSAPAQAAQAVPTL

SEQ ID NO: 305 - protein, 495 aa, Escherichia coli
VADRNLRDLLAPWVPDAPSRALREMTLDSRVAAAGDLFVAVVGHQADGRRYIPQAIAQGVAAIIAEAKGEATDGEIREMHGVPVIYLSQLNERLSALAGRFYHEPSDNLRLVGVTGTNGKTTTTQLLAQWSQLLGETSAVMGTVGNGLLGKVIPTENTTGSAVDVQHELAGLVDQDATFCAMEVSSHGLVQHRVAALKFAASVFTNLSRDHLDYHGDMEHYEAAKWLLYSEHHCGQAIINADDEVGRRWLAKLPDAVAVSMEDHINPNCHGRWLKATEVNYHDSGATIRFSSSWGDGEIESHLMGAFNVSNLLLALATLLALGYPLADLLKTAARLQPVCGRMEVFTAPGKPTVVVDYAHTPDALEKALQAARLHCAGKLWCVFGCGGDRDKGKRPLMGAIAEEFADVAVVTDDNPRTEEPRAIINDILAGMLDAGHAKVMEDRAEAVTCAVMQAKENDVVLVAGKGHEDYQIVGNQRLDYSDRVTVARLLGVIA

SEQ ID NO: 306 - protein, 824 aa, Escherichia coli
MLQCGAKNVNPLERFVSSLPVAAVLPELLTALDYAPQVLLSAPTGAGKSTWLPLQLLAHPGINGKIILLEPRRLAARNVAQRLAELLNEKPGDTVGYRMRAQNCVGPNTRLEVVTEGVLTRMIQRDPELSGVGLVILDEFHERSLQADLALALLLDVQQGLRDDLKLLIMSATLDNDRLQQMLPEAPVVISEGRSFPVERRYLPLPTHQRFDDAVAVATAEMLRQESGSLLLFLPGVGEIQRVQEQLASRIGSDVLLCPLYGALSLNDQRKAILPAPQGMRKVVLATNIAETSLTIEGIRLVVDCAQERVARFDPRTGLTRLITQRISQASMTQRAGRAGRLEPGICLHLIAKEQAERATAQSEPEILQSDLSGLLMELLQWGCSDPAQMSWLDQPPTVNLLAAKRLLQMLGALDGERLSAQGQKMAALGNDPRLAAMLVSAKSDDEAATAAKIAAILEEPPRMGNSDLGVAFSRNQPAWQQRSQQLLKRLNVRGGEADSSLIAPLLAGAFADRIARRRGQDGRYQLANGMGAMLDADDALSRHEWLIAPLLLQGSASPDARILLALPVDIDELVQRCPQLVQQSDTVEWDDAQGTLKAWRRLQIGQLTVKVQPLAKPSEDELHQAMLNGIRDKGLSVLNWTAEAEQLRLRLLCAGKWLPEYDWPAVDDESLLATLETWLLPHMAGVHSLRGLKSLDIYQALRGLLDWGMQQRLDSELPAHYTVPTGSRIAIRYHEDNPPALAVRMQEMFGEATNPTIAQGRVPLVLELLSPAQRPLQITRDLGAFWKGAYREVQKEMKGRYPKHVWPDDPANTAPTRRTKKYS

SEQ ID NO: 307 - protein, 844 aa, Escherichia coli
MAGNDREPIGRKGKPTRPVKQKVSRRRYEDDDDYDDYDDYEDEEPMPRKGKGKGKGRKPRGKRGWLWLLLKLAIVFAVLIAIYGVYLDQKIRSRIDGKVWQLPAAVYGRMVNLEPDMTISKNEMVKLLEATQYRQVSKMTRPGEFTVQANSIEMIRRPFDFPDSKEGQVRARLTFDGDHLATIVNMENNRQFGFFRLDPRLITMISSPNGEQRLFVPRSGFPDLLVDTLLATEDRHFYEHDGISLYSIGRAVLANLTAGRTVQGASTLTQQLVKNLFLSSERSYWRKANEAYMALIMDARYSKDRILELYMNEVYLGQSGDNEIRGFPLASLYYFGRPVEELSLDQQALLVGMVKGASIYNPWRNPKLALERRNLVLRLLQQQQIIDQELYDMLSARPLGVQPRGGVISPQPAFMQLVRQELQAKLGDKVKDLSGVKIFTTFDSVAQDAAEKAAVEGIPALKKQRKLSDLETAIVVVDRFSGEVRAMVGGSEPQFAGYNRAMQARRSIGSLAKPATYLTALSQPKIYRLNTWIADAPIALRQPNGQVWSPQNDDRRYSESGRVMLVDALTRSMNVPTVNLGMALGLPAVTDTWIKLGVPKDQLHPVPAMLLGALNLTPIEVAQAFQTIASGGNRAPLSALRSVIAEDGKVLYQSFPQAERAVPAQAAYLTLWTMQQVVQRGTGRQLGAKYPNLHLAGKTGTTNNNVDTWFAGIDGSTVTITWVGRDNNQPTKLYGASGAMSIYQRYLANQTPTPLNLVPPEDIADMGVDYDGNFVCSGGMRVLPVWTSDPQSLCQQSEMQQQPSGNPFDQSSQPQQQPQQQPAQQEQKDSDGVAGWIKDMFGSN

SEQ ID NO: 308 - protein, 265 aa, Escherichia coli
MQEYTNHSDTTFALRNISFRVPGRTLLHPLSLTFPAGKVTGLIGHNGSGKSTLLKMLGRHQPPSEGEILLDAQPLESWSSKAFARKVAYLPQQLPPAEGMTVRELVAIGRYPWHGALGRFGAADREKVEEAISLVGLKPLAHRLVDSLSGGERQRAWIAMLVAQDSRCLLLDEPTSALDIAHQVDVLALVHRLSQERGLTVIAVLHDINMAARYCDYLVALRGGEMIAQGTPAEIMRGETLEMIYGIPMGILPHPAGAAPVSFVY

SEQ ID NO: 309 - protein, 296 aa, Escherichia coli
MSGLPLISRRRLLTAMALSPLLWQMNTAHAAAIDPNRIVALEWLPVELLLALGIVPYGVADTINYRLWVSEPPLPESVIDVGLRTEPNLELLTEMKPSFMVWSAGYGPSPEMLARIAPGRGFNFSDGKQPLAMARKSLTEMADLLNLQSAAETHLAQYEDFIRSMNPRFVKRGARPLLLTTLIDPRHMLVFGPNSLFQEILDEYGIPNAWQGETNFWGSTAVSIDRLAAYKDVDVLCFDHDNSKDMDALMATPLWQAMPFVRAGRFQRVPAVWFYGATLSAMHFVRVLDNAIGGKA

SEQ ID NO: 310 - protein, 185 aa, Escherichia coli
VISDIRKDAEVRMDKCVEAFKTQISKIRTGRASPSLLDGIVVEYYGTPTPLRQLASVTVEDSRTLKINVFDRSMSPAVEKAIMASDLGLNPNSAGSDIRVPLPPLTEERRKDLTKIVRGEAEQARVAVRNVRRDANDKVKALLKDKEISEDDDRRSQDDVQKLTDAAIKKIEAALADKEAELMQF

SEQ ID NO: 311 - protein, 1035 aa, Escherichia coli
MVIGPAGSGKTTLLREGFPSDIIYAPEGARGTEQRLYLTPHVGKQAVIFDIDGTLCAPADADILHRRLWEHALGWLKEKRARQPLNGIILTLDLPDLLTADKRHREHLLQTLRSRLQDIRQHLHCQLPVYVVLTRLDLLQGFAALFQSLNRQDRDAILGVTFTRRAHENDDWRTELNAFWQTWVDRMNLALPDLMVTQTHTRASLFSFSRQMQGSREPLVSLLEGLLDGENMNVMLRGVYLTSSLQRGQMDDIFTQSAARQYRLGNNPLASWPLVDTAPYFTRSLFPQALLAEPNLATESRAWLMRSRRRLTVFSATGGVAALLLITGWHHYYNGNYQSGITVLKQAKAFMDVPPPQGEDDYGNLQLPLLNPVRDATLAYGDWGDRSRLADMGLYQGRRIGPYVEQTYLQLLEQRYLPSLFNGLVKAMNAAPPESEEKLAVLRVMRMLEDKSGRNNEVVKQYMAKRWSEKFHGQRDIQAQLMSHLDYALAHTDWHAERQAGDGDAISRWTPYDKPVVSAQKELSKLPVYQRVYQSLKTRALGVLPADLNLRDQVGPTFDQVFTSADDNKLVVPQFLTRYGLQSYFVKQRDELVELTAMDSWVLNLTRSVKYSDADRAEIQRQLTEQYISDYTATWRAGMDNLNIRNFESIGQLTGALEQVISGDQPLQRALTVLRDNTQPGVFSEKLSAKERDEALAEPDYQLLTRLGHEFAPENITLAVQKDKESTMQAVYQQLTELHRYLLAIQNAPVPGKSALKAVQLRLDQNSSDPIFATRQMAKTLPAPLNRWVGRLTDQAWHVVMVEAVHYMEVDWRDSVVKPFNEQLANNYPFNPRSAQDASLDAFERFFKPDGILDTFYQQNLKLFIDNDLSLEDGDNNVIIREDIIAQLETAQKIRDIFFSKQNGLGTSFAVETVSLSGNKRRSVLNLDGQLVDYSQGRNYTAHLVWPNNMREGNESKLTLIGTSGNAPRSISFSGPWAQFRLFGAGQLTGVQDGNFTVRFSVDGGAMTYRVHTDTEDNPFSGGLFSQFGLSDTLY

SEQ ID NO: 312 - protein, 732 aa, Escherichia coli
MKFDKPAGENPIDQLKVVGRPHDRIDGPLKTTGTARYAYEWHEESPNAAYGYIVGSAIAKGRLTALDTDAAQKAPGVLPVITASNAGALSKGDKNTARLLGGPTIEHYHQAIALVVAETFEQARAAASLVQAHYRRNKGAYSLADEKQAVSQPPEDTPDKNVGDFDGAFSSAAVKIDATYTTPDQSHMAMEPHASMAVWDGNKLTLWTSNQMIDWCRTDLAKTLKVPVENVRIISPYIGGGFGGKLFLRSDALLAALAARAVKRPVKVMLPRPSIPNNTTHRPATLQHLRIGADQSGKITAISHESWSGNLPGGTPETAVQQSELLYAGANRHTGLRLATLDLPEGNAMRAPGEAPGLMALEIAIDELAEKAGIDPVEFRILNDTQIDPADPTRRFSRRQLIECLRTGADKFGWKQRNATPGQVRDGEWLVGHGVAAGFRNNLLEKSGARVHLEPNGTVTVETDMTDIGTGSYTILAQTAAEMLGVPLEQVAVHLGDSSFPVSAGSGGQWGANTSTSGVYAACVKLREMIASAVGFDPEQSQFADGKITNGTRSAILHEATAGGRLTAEESIEFGTLSKEYQQSTFAGHFVEVGVHSATGEVRVRRMLAVCAAGRILNPKTARSQVIGAMTMGMGAALMEELAVDDRLGYFVNHDMAGYEVPVHADIPKQEVIFLDDTDPISSPMKAKGVGELGLCGVSAAIANAVYNATGIRVRDYPITLDKLLDKLPDVV

SEQ ID NO: 313 - protein, 318 aa, Escherichia coli
MKAFTYERVNTPAEAALSAQRVPGAKFIAGGTNLLDLMKLEIETPTHLIDVNGLGLDKIEVTDAGGLRIGALVRNTDLVAHERVRRDYAVLSRALLAGASGQLRNQATTAGNLLQRTRCPYFYDTNQPCNKRLPGSGCAALEGFSRQHAVVGVSEACIATHPSDMAVAMRLLDAVVETITPEGKTRSITLADFYHPPGKTPHIETALLPGELIVAVTLPPPLGGKHIYRKVRDRASYTFALVSVAAIIQPDGSGRVALGGVAHKPWRIEAADAQLSQGAQAVYDALFASAHPTAENTFKLLLAKRTLASVLAEARAQA

SEQ ID NO: 314 - protein, 547 aa, Escherichia coli
MRVNLLIAMIIFALIWPVTALRAAVSKTTWADAPAREFVFVENNSDDNFFVTPGGALDPRLTGANRWTGLKYNGSGTIYQQSLGYIDNGYNTGLYTNWKFDMWLENSPVSSPLTGLRCINWYAGCNMTTSLILPQTTDTSGFYGATVTSGGAKWMHGMLSDAFYQYLQQMPVGSSFTMTINACQTSVNYDASSGARCKDQASGNWYVRNVTHTKAANLRLINTHSLAEVFINSDGVPTLGEGNADCRTQTIGSRSGLSCKMVNYTLQTNGLSNTSIHIFPAIANSSLASAVGAYDMQFSLNGSSWKPVSNTAYYYTFNEMKSADSIYVFFSSNFFKQMVNQGISDINTKDLFNFRFQNTTSPESGWYEFSTSNTLIIKPRDFSISIISDEYTQTPSREGYVGSGESALDFGYIVTTSGKTAADEVLIKVTGPAQVIGGRSYCVFSSDDGKAKVPFPATLSFITRNGATKTYDAGCDDSWRDMTDALWLTTPWTDISGEVGQMDKTTVKFSIPMDNAISLRTVDDNGWFGEVSASGEIHVQATWRNIN

SEQ ID NO: 315 - protein, 841 aa, Escherichia coli
MPLRRFSPGLKAQFAFGMVFLFVQPDASAADISAQQIGGVIIPQAFSQALQDGMSVPLYIHLAGSQGRQDDQRIGSAFIWLDDGQLRIRKIQLEESEDNASVSEQTRQQLMALANAPFNEALTIPLTDNAQLDLSLRQLLLQLVVKREALGTVLRSRSEDIGQSSVNTLSSNLSYNFGIYNNQLRNGGSNTSSYLSLNNVTALREHHVVLDGSLYGIGSGQQDSELYKAMYERDFAGHRFAGGTLDTWNLQSLGPMTAISAGKIYGLSWGNQASSTIFDSSQSATPVIAFLPAAGEVHLTRDGRLLSVQNFTMGNHEVDTRGLPYGIYDVEVEVIVNGRVISKRTQRVNKLFSRGRGVGAPLAWQVWGGSFHMDRWSENGKKTRPAKESWLAGASTSGSLSTLSWAATGYGYDNQAVGETRLTLPLGGAINVNLQNMLASDSSWSSIGSISATLPGGFSSLWVNQEKTRIGNQLRRSDADNRAIGGTLNLNSLWSKLGTFSISYNDDRRYNSHYYTADYYQNVYSGTFGSLGLRAGIQRYNNGDSNANTGKYIALDLSLPLGNWFSAGMTHQNGYTMANLSARKQFDEGTIRTVGANLSRAISGDTGDDKTLSGGAYAQFDARYASGTLNVNSAADGYVNTNLTANGSVGWQGKNIAASGRTDGNAGVIFNTGLEDDGQISAKINGRIFPLNGKRNYLPLSPYGRYEVELQNSKNSLDSYDIVSGRKSHLTLYPGNVAVIEPEVKQMVTVSGRIRAEDGTLLANARINNHIGRTRTDENGEFVMDVDKKYPTIDFRYSGNKTCEVALELNQARGAVWVGDVVCSGLSSWAAVTQTGEENES

SEQ ID NO: 316 - protein, 222 aa, Escherichia coli
MKKHLLLLALLLSGISPAQALDVGDISSFMNSDSSTLSKTIKNSTDSGRLINIRLERLSSPLDDGQVISMDKPDELLLTPASLLLPAQASEVIRFFYKGPADEKERYYRIVWFDQALSDAQRDNANRSAVATASARIGTILVVAPRQANYHFQYANGTLTNTGNATLRILAYGPCLKAANGKECKENYYLMPGKSRRFTRVDTADNKGRVALWQGDKFIPVK

SEQ ID NO: 317 - protein, 1417 aa, Escherichia coli
MSRYKTGHKQPRFRYSVLARCVAWANISVQVLFPLAVTFTPVMAARAQHAVQPRLSMGNTTVTADNNVEKNVASFAANAGTFLSSQPDSDATRNFITGMATAKANQEIQEWLGKYGTARVKLNVDKDFSLKDSSLEMLYPIYDTPTNMLFTQGAIHRTDDRTQSNIGFGWRHFSGNDWMAGVNTFIDHDLSRSHTRIGVGAEYWRDYLKLSANGYIRASGWKKSPDIEDYQERPANGWDIRAEGYLPAWPQLGASLMYEQYYGDEVGLFGKDKRQKDPHAISAEVTYTPVPLLTLSAGHKQGKSGENDTRFGLEVNYRIGEPLAKQLDTDSIRERRVLAGSRYDLVERNNNIVLEYRKSEVIRIALPERIEGKGGQTLSLGLVVSKATHGLKNVQWEAPSLLAEGGKITGQGSQWQVTLPAYRPGKDNYYAISAVAYDNKGNTSKRVQTEVVITGAGMSADRTALTLDGQSRIQMLANGNEQKPLVLSLRDAEGQPVTGMKDQIKTELTFKPAGNIVTRSLKATKSQAKPTLGEFTETEAGVYQSVFTTGTQSGEATITVSVDGMSKTVTAELRATMMDVANSTLSANEPSGDVVADGQQAYTLTLTAVDSEGNPVTGEASRLRFVPQDTNGVTVGAISEIKPGVYSAAVSSTRAGNVVVRAFSEQYQLGTLQQTLKFVAGPLDAAHSSITLNPDKPVVGGTVTAIWTVKDAYDNPVTSLTPEAPSLAGAAAEGSTASGWTNNGDGTWTAQITLGSTAGELEVMPKLNGQNAAANAAKVTVVADALSSNQSKVSVAEDHVKAGESTTVTLVAKDAHGNAISGLALSASLTGTASEGATVSSWTEKGNGSYVATLTTGGKTGELRVMPLFNGQPAATEAAQLTVIAGEMSSANSTLVADNKAPTVKTTTELTFTVKDAYGNPVTGLKPDAPVFSGAASTGSERPSAGNWTEKGNGVYVSTLTLGSAAGQLSVMPRVNGQNAVAQPLVLNVAGDASKAEIRDMTVKVNNQLANGQSANQITLTVVDTYGNPLQGQEVTLTLPQGVTSKTGNTVTTNAAGKADIELMSTVAGEHNISASVNGAQKTVTVKFNADASTGQANLQVDAAAQKVANGKDAFTLTANVEDKNGNPVPGSLVTFNLPRGVKPLTGDNVWVKANDEGKAELQVVSVTAGTYEITASAGNSQPSNTQTITFVADKATATVSGIEVIGNYALADGNAKQTYKVTVTDANNNLLKDSEVTLTASPANLVLTPNGTAKTNEQGQAIFTATTTVAAKYTLTAKVSQADGQESTKTAESKFVADDTNAVLTASSDVTSLVADGISTAKLEVTLMSANNPVGGNMWVDIKTPEGVTEKDYQFLPSKNDHFVSGKITRTFSTSKPGVYTFTFNALTYGGYEMKPVTVTITAVDADTAKGEEAMN

SEQ ID NO: 318 - protein, 475 aa, Escherichia coli
MSIKTSNTDFKTRIRQQIEDPIMRKAVANAQQRIGANRQKMVDELGLWEEWRDRAAQIRDHVLSNLDAYLYQLSEKVTQNGGHVYFAKTKEDATRYILQVAQRKNARKVVKSKSMVTEEIGVNHVLQDAGIQVIETDLGEYILQLDQDPPSHVVVPAIHKDRHQIRRVLHERLGYEGPETPEAMTLFIRQKIREDFLSAEIGITGCNFAVAETGSVCLVTNEGNARMCTTLPKTHIAVMGMERIAPTFAEVDVLITMLARSAVGARLTGYNTWLTGPREAGHVDGPEEFHLVIVDNGRSEVLASEFRDVLRCIRCGACMNTCPAYRHIGGHGYGSIYPGPIGAVISPLLGGYKDFKDLPYACSLCTACDNVCPVRIPLSKLILRHRRVMAEKGITAKAEQRAIKMFAYANSHPGLWKVGMMAGAHAASWFINGGKTPLKFGAISDWMEARDLPEADGESFRSWFKKHQAQEKKNG

SEQ ID NO: 319 - protein, 605 aa, Escherichia coli
MMLNAWHLPVPPFVKQSKDQLLITLWLTGEDPPQRIMLRTEHDNEEMSVPMHKQRSQPQPGVTAWRAAIDLSSGQPRRRYSFKLLWHDRQRWFTPQGFSRMPPARLEQFAVDVPDIGPQWAADQIFYQIFPDRFARSLPREAEQDHVYYHHAAGQEIILRDWDEPVTAQAGGSTFYGGDLDGISEKLPYLKKLGVTALYLNPVFKAPSVHKYDTEDYRHVDPQFGGDGALLRLRHNTQQLGMRLVLDGVFNHSGDSHAWFDRHNRGTGGACHNPESPWRDWYSFSDDGTALDWLGYASLPKLDYQSESLVNEIYRGEDSIVRHWLKAPWNMDGWRLDVVHMLGEAGGARNNLQHVAGITEAAKETQPEAYIVGEHFGDARQWLQADVEDAAMNYRGFTFPLWGFLANTDISYDPQQIDAQTCMAWMDNYRAGLSHQQQLRMFNQLDSHDTARFKTLLGREVARLPLAVVWLFTWPGVPCIYYGDEVGLDGKNDPFCRKPFPWQVEKQDMALFALYQRMIALRKKSQALRRGGCQVLYAEDNVVVFVRVLNQQRVLVAINRGEACEVVLPASPFLNVVQWQRKEGHGQLTDGILALPAISATVWMN

SEQ ID NO: 320 - protein, 481 aa, Escherichia coli
MTISNSNLLKPFITGTELPPFKEDVFSKTEEQFKKSTYGKSLFISGNENLVNISAEKIDEIKNSKNFFSNIVNIIILLIKHPDKILPILHGCPVESIEVIKNAKRTGQWSYEMTDKNGQSIEVSYIFTDTIDDKSDGKLCLKICNSCNQNDSSTHEYKIDHQQLKNHIRQLEEWALLEKFYDNNAYYSKRTKQLEKKIADAGFITRKVKAENFNVKEFKDDIASMLCEQPPMRTHQISSSGYVSADKLHKLYKTNLEDAQRDLKTTPVDIDGVSLKSITREKIAEEIAKKTAEIIAKQNAKSIEEKNIEKNKKQTNSEDNFVLKFSPEEINEMLLDYSDEEQKKLRPFFTSDHIYCLFDAFSQGLHNVARNGSPRYAGLLRQIASKSAILQDFDQQLFWRTFTGGVLHRHISVKSEPEKTDVWRFSSQFDFPHINENGELSRTVLMFEGVAESNFKDIANHSSECFSYRCYAAPLDANAKK

SEQ ID NO: 321 - protein, 1461 aa, Escherichia coli
MSLIIDVISRKTSVKQTLINPGDVTVVIYEPSVVQVHAQASAVARYVREGNDLLIYMQDGTVIRCNGYFLQAANTAEQSELVFADGQQLTHITFADTAAGGLAPVELTAQTTAIESIAPFLDTVAQTSAFPWGWLAGAAVGGGALGALLASGGDGDSKTEVINNPTPPAEPGNATPSFLVTDNQGDQRGILATNDITDDTTPTFSGSGQAGATIQIKDSNGNTIASTQVDNNGHWSVSLPTQSAGEHTWSVVQIVGSTITDAGSITLTIDNSQASVQVATTAGDNIINASEQAAGFTLSGTSSHLAQGTELTVTLNGKTYTTSVGANGAWSVQVPTADAQALGEGNQAVLVSGKDATGNTVTGAQLLTVDTQPPTLAINTIAQDNIISAAEHNVALVLSGTSNAEAGQTVTLTVNGKSHTATVGSDGTWQVTLPATEVQALAEGNYAVNASVSDRAGNTTSHSANFTVDTSAPVVSVNTVAGDDILNNAEQAVAQIISGQVSGASPGDTVTVKLGTHVLTGIVLADGSWNVALDPAVTRTLDRGANTIFVTVTDAAGNTGAASRAITLVGVSPLITINTVSGDDIISGAEKGAPLTLTGSTQQAETGQTVTVTLAGQSFTTTVQADGSWSLTVPAAAMGNLPDGAVAITASVTDLSGNTGNTSRTITVDSQAPALSIDPLTADNIINAAESGQDLPITGTTDAQPGQTVTVTLNGQTYQGVVQPDGTWSVTVPAANVGALADGNATVTASVNDVAGNPSSVSRVALVDATPPVVTINPVATDNVINTPEHAQAQIISGTVTGAQAGDIVTVTLNNVDYTTVVDGSGNWSLGVPASVVSGLADGSYPVSVSVTDKAGNTGSQSLTVTVNTAAPLIGINSIAGDDVINASEKGADLQITGTSDQPVNTAITVTLNGQNYTTTTDASGNWSVTVPASAVTALGQANYTVTAAVTSDIGNSATASHNVLVDSALPGVTINPVATDDIINAAEAGVAQTISGQVTGAEDGDTVTITLGGNTYTATVGSNLTWSVDVPAADIQALGNGDLTVNASVTNQNGNTGSGTRDITIDANLPGLRVDTVAGDDVVNIIEHGQALVVTGSSSGLAESTPLTVTINNVEYTTAVQADGSWSVGVTAAQVSAWPAGTVNIAVSGESSAGNSVSITHPVTVDLTPAAITINTIATDDVINAAEKGADLTLSGTTTNVEPGQTVTVTFGGKNYTASVASDGSWTATVPAADLASLPEGSASALASVSNINGNSASAVHNYSVDSSAPTIIINTVASDNIVNASEADAGVTVSGSTTAEAGQIVTITLNSPTVQTYQATVQADGSWSINIPAADLEALTDGSHTLTATVNDKAGNPASTTHNLAVDLTVPVLTINTIAGDDIINATEHGQALVISGSSTGGEAGDVVTVTLNSKTYTTTLDASGNWSVGVPAADVTALGSGPQTVTATVTDAAGNSDN

SEQ ID NO: 322 - protein, 338 aa, Escherichia coli
MKTVNVALLALIISATSSPVVLAGDTIEAAATELSAINSGMSQSEIEQKITRFLERTDNSPAAYTYLTEHHYIPSETPDTTQTPTVQTDPDAGQKTVAATGDVQTTARYQSMINARQSAVTDAQQTQITEQQAQIVATQKTLAATGDTQNTAHYQEMINARLAAQNEANQRTATEQGQKMNALTTDVAVQQQNERTQYDKQMQSLAQESAQAHEQIDSLSQDVTQTHQQLTNTQKRVADNSQQINTLNNHFSSLKNEVDDNRKEANAGTASAIAIASQPQVKTGDVMMVSAGAGTFNGESAVSVGTSFNAGTHTVLKAGISADTQSDFGAGVGVGYSF

SEQ ID NO: 323 - protein, 228 aa, Escherichia coli
MPAENIVEVHHLKKSVGQGEHELSILTGVELVVKRGETIALVGESGSGKSTLLAILAGLDDGSSGEVSLVGQPLHNMDEEARAKLRAKHVGFVFQSFMLIPTLNALENVELPALLRGESSAESRNGAKALLEQLGLGKRLDHLPAQLSGGEQQRVALARAFNGRPDVLFADEPTGNLDRQTGDKIADLLFSLNREHGTTLIMVTHDLQLAARCDRCLRLVNGQLQEEA

SEQ ID NO: 324 - protein, 308 aa, Escherichia coli [sequence omitted]

SEQ ID NO: 325 - protein, 869 aa, Escherichia coli
MKIPTTTDIPQRYTWCLAGICYSSLAILPSFLSYAESYFNPAFLLENGTFVADLSRFERGNHQPAGVYRVDLWRNDEFIGSQDIVFESTTENTGDKSGGLMPCFNQVLLERIGLNSSAFPELAQQQNNKCINLLKAVPDATINFDFAAMRLNITIPQIALLSSAHGYIPPEEWDEGIPALLLNYNFTGNRGNGNDSYFFSELSGINIGPWRLRNNGSWNYFRGNGYHSEQWNNIGTWVQRAIIPLKSELVMGDGNTGSDIFDGVGFRGVRLYSSDNMYPDSQQGFAPTVRGIARTAAQLTIRQNGFIIYQSYVSPGAFEITDLHPTSSNGDLDVTIDERDGNQQNYTIPYSTVPILQREGRFKFDLTAGDFRSGNSQQSSPFFFQGTALGGLPQEFTAYGGTQLSANYTAFLLGLGRNLGNWGAVSLDVTHARSQLADDSRHEGDSIRFLYAKSMNTFGTNFQLMGYRYSTQGFYTLDDVAYRRMEGYEYDYDYDGEHRDEPIIVNYHNLRFSRKDRLQLNISQSLNDFGSLYISGTHQKYWNTSDSDTWYQVGYTSSWVGISYSLSFSWNESVGIPDNERIVGLNVSVPFNVLTKRRYTRENALDRAYASFNANRNSNGQNSWLAGVGGTLLEGHNLSYHVSQGDTSNNGYTGSATANWQAAYGTLGVGYNYDRDQHDVNWQLSGGVVGHENGITLSQPLGDTNVLIKAPGAGGVRIENQTGILTDWRGYAVMPYATVYRYNRIALDTNTMGNSIDVEKNISSVVPTQGALVRANFDTRIGVRALITVTQGGKPVPFGSLVRENSTGITSMVGDDGQVYLSGAPLSGELLVQWGDGANSRCIAHYVLPKQSLQQAVTVISAVCTHPGS

SEQ ID NO: 326 - protein, 990 aa, Escherichia coli
MKENNLNRVIGWSGLLLTSLLSTSALADNIGTSAEELGLSDYRHFVIYPRLDKALKAQKNNDEATAIREFEYIHQQVPDNIPLTLYLAEAYRHFGHDDRARLLLEDQLKRHPGDARLERSLAAIPVEVKSITTVEELLAQQKACDAAPTLRCRSEVGQNALRLAQLPVARAQLNDATFAASPEGKTLRTDLLQRAIYLKQWSQADTLYNEARQQNTLSAAERRQWFDVLLAGQLDDRILALQSQGIFTDPQSYITYATALAYRGEKARLQHYLIENKPLFTTDAQEKSWLYLLSKYSANPVQALANYTVQFADNRQYVVGATLPVLLKEGQYDAAQKLLATLPANEMLEERYAVSVATRNKAEALRLARLLYQQESANLTRLDQLTWQLMQNEQSREAADLLLQRYPFQGDARISQTLMARLASLLESHPYLATPAKVAILSKPLPLAEQRQWQSQLPGIADNCPAIVRLLGDMSPSYDAAAWNRLAKCYRDTLPGVALYAWLQAEQRQPNAWQHRAVAYQAYQVEDYATALAARQKISLHDMSNEDLLAAANTAQAAGNGAARDRWLQQAEQRGLGSNALYWWLHAQRYIPGQPELALNDLTRSINIAPSANAYVARATIYRQRHNVPAAVSDLRAALELEPNNSNTQAALGYALWDSGDIAQSREMLEQAHKGLPDDPALIRQLAYVNQRLDDMPATQHYARLVIDDIDNQALITPLTPEQNQQRFNFRRLHEEVGRRWTFSFDSSIGLRSGAMSTANNNVGGAAPGKSYRSYGQLEAEYRIGRNMLLEGDLLSVYSRFFADTGENGVMMPVKNPMSGTGLRWKPLRDQIFFLAVEQQLPLNGQNGASDTMLRASASFFNGGKYSDEWHPNGSGWFAQNLYLDAAQYIRQDIQAWTADYRVSWHQKVANGQTIEPYAHVQDNGYRDKGTQGAQLGGVGVRWNIWTGETHYDAWPHKVSLGVEYQHTFKAINQRNGERNNAFLTIGVHW

SEQ ID NO: 327 - protein, 378 aa, Escherichia coli
MELKKLMEHISIIPDYRQAWKVEHKLSDILLLTICAVISGAEGWEDIEDLGETHLNFLKQYGDFENGIPVHDTIARVVSCISPAKFHECFINWMRDCHSSDDKDVIAIDGKTLRHSYDKSRRRRAIHVISAFSTMHSLVIGQIKTDEKSNEITAIPELLNMLDIKGKIITTDAMGCQKDIAEKIQKQGGDYLFAVKGNQGRLNKAFEEKFPLKELNNPEHDSYAMSEKSHGREEIRLHIVCDVPDELIDFTFEWKGLKKLCVAVSFRSIIAEQKKESEMTVRYYISSADLTAEKFATAIRNHWHVENKLHWRLDVVVNEDDCKIRRGNAAELFSGIRHIAINILTNDKVFKAGLRRKMRKAAMDRNYLASVFAGSGLS

SEQ ID NO: 328 - protein, 1616 aa, Escherichia coli
MSEGPGGPQGATAGGTLAMRMLSQRAMAASQMKRAANDKAIAQMLASKKSGPPAARLGDEIQHKSFLGALAGAVLGAIVTIAEGCLIMAACATGPYALVLVPALMYASYKASDYVEEKQNQLESWINSFCDTDGAINTGSKNVKINGKPAARAAVTLPPPPPPGAIPEVPQGEPSWGDIATDLLESAAEKAVPLAKAWGNAVITLTDSNAGFMDRVSAGASLLFPAGPVLMEFATMVGGRGEIKKDVDFPEAGEDTALCDKENKPPRIAQGSSNVFINNQPAARKGDKLECSAAIVEGSPDVFIGGEQVTYLDIQPEFPPWQRMILGGITIASYLLPPAGLLGKLGNLAKLGKLGNLLGKSGKLLGAKLGALLGKTGNSLKSIANKVIRWVTDPVDPVTGAYCDERTDFTLGQTLPLSFTRFHSSVLPLHGLTGVGWSDSWSEYAWVREQGNRVDVISLGATLNFAFDGESDTAVNPYHAQYILRRRDDYLELFDRDALSSRFFYDAFPGMRLRHPVTDDTSDDRLAHSPADRMYMLGGMSDTASNRITFERDTQYRITGVSHTDGIRLKLTYHASGYLKAIHRTDNGIQTLATYEQDARLDYHLFYEYDAADRIIRWSDNDQTWSRFTYDAQGRCVTVTGAEGYYNATLDYGDGCTTVTDGKGIHRYYYDPDGNILREEAPDGSTTTYEWDEFHHLLARHSPAGRVEKFEYNAAHGQLSRYTAADGADWQYCYDERGLLSNITAPAGQTWTQQCDERGLPVSLVSPQGEETRLAYTPQGLLSGIFRQDERRLGIEYDHHNWPETLTDVMGREHHTEYSGHDLPVKMRGPGGQSVRLQWQQHHKLSGLERAGTGAEGFRYDRHGNLLAYTDGNGVVWTMEYGPFDLPVARTDGEGHRWQYRYDKDTLQLTEVINPQGESYLYILDNCGRVTEERDWGGVVCRYRYDADGLCTARVNGLEETILYSRDAAGRLAEVITPEGKTQYAYDKSGRLTGIFSPDGTSQRTGYDERGRVNVTTQGRRAIEYHYPDEHTVIRCILPPEDERDRHPDGSLLKTTYRYNAAGELTEVILPGDETLTFSRDEAGREVLRHSNRGFACEQGWNAAGQPVSQRAGLFPAEATWGGLLPSLLREYRYDSAGNVSGVTSREDYGRETHREYRLDRNGQVTAVTASGTGLGYGEGDETYGYDSCGYLKAQSAGRHRISGETDQYAAGHRLKQAGNTQYDYDAAGRMVSRTKHRDGYRPETERFRWDSRDQLTGYRSAQGEQWEYRHDASGRRTEKRCDRKKIRFTYLWDGDSIAEIREYRDDKLYSVRHLVFNGFELISQQFSRVRQPHPSVAPQWVTRTNHAVSDLTGRPLMLFNSEGKTVWRPGQTSLWGLALSLPADTDYPDPRGERDPEADPGLLYAGQWQDAESGLCYNRFRYYEPETGMYLVSDPLGLQGGEQTYRYVPNPCGYIDPLGLAICQLARWTKWGSEQSNISDVLNSLGNRALKYANGDWIKSEAAFNKYINMINKRLELTGSKFRVEIQPAIKNGERVPATTNGPFKVNGKWTSGTHYTGGSKRLDAGIIDITSPTNQYGLHPVIEGFDITLNKTKPSAVDIYSDVFGGIDINDFRL

SEQ ID NO: 329 - protein, 556 aa, Escherichia coli
MDNAELAIGIDLGTTNSLIAVWKDGAAQLIPNKFGEYLTPSIISMDENNHILVGKPAVSRRTSHPDKTAALFKRAMGSNTNWRLGSDTFNAPELSSLVLRSLKEDAEEFLQRPIKDVVISVPAYFSDEQRKHTRLAAELAGLNAVRLINEPTAAAMAYGLHTQQNTRSLVFDLGGGTFDVTVLEYATPVIEVHASAGDNFLGGEDFTHMLVDEVLKRADVARTTLNESELAALYACVEAAKCSNQSPIHIRWQYQDETRECEFYENELEDLWLPLLNRLRVPIEQALRDARLKPSQIDSLVLVGGASQMPLVQRIAVRLFGKLPYQSYDPSTIVALGAAIQAACRLRSEDIEEVILTDICPYSLGVEVNRQGVSGIFSPIIERNTTVPVSRVETYSTMHPEQDSITVNVYQGENHKVKNNILVESFDVPLKRTGAYQSIDIRFSYDINGLLEVDVLLEDGSVKSRVINHSPVTLSAQQIEESRTRLSALKIYPRDMLINRTFKAKLEELWARALGDEREEIGRVITDFDAALQSNDMARVDEVRRQASVYLAIEIP

SEQ ID NO: 330 - protein, 173 aa, Escherichia coli
MQLNKVLKGLMIALPVMAIAACSSNKNASNDGSEGMLGAGTGMDANGGNGNMSSEEQARLQMQQLQQNNIVYFDLDKYDIRSDFAQMLDAHANFLRSNPSYKVTVEGHADERGTPEYNISLGERRANAVKMYLQGKGVSADQISIVSYGKEKPAVLGHDEAAYSKNRRAVLVY

SEQ ID NO: 331 - protein, 165 aa, Escherichia coli
MSPSLRKAVAAAIGGGAAAIASVLITGPSGDDGLEGVSYIPYEDIVGVWTVCHGHTGKDIIPGKTYTEAECKALLNKDLATVARQINPYIKVDIPETTRGALYSFVYNVGAGNFRTSTLLRKINQGDIKGACDQLRRWTYAGGKQWKGLMTRREIEREVCLWGQQ

SEQ ID NO: 332 - protein, 251 aa, Escherichia coli
MATVNKQAIAAAFGRAAAHYEQHAELQRQSADVLLAMLPQRKYPHVLDAGCGPGWMSRHWRERHAQVTALDLSPPMLAQARQKDAADHYLAGDIESLPLATATFDLAWSNLAVQWCGNLSTALRELYRVVRPGGVVAFTTLVQGSLPELHQAWQAVDERPHANRFLPPDEIEQSLNGVHYQHRIQPITLWFDDALSAMRSLKGIGATHLHEGRDQRILTRSQLQRLQLAWPQQQGRYPLTYHLFLGVIVRE

SEQ ID NO: 333 - protein, 583 aa, Escherichia coli
VTRQDMNDAVITLNGLEKRFPGMDKPAVAPLDCTIHAGYVTGLVGPDGAGKTTLMRMLAGLLKPDSGNATVIGFDPIKNDGALHAVLGYMPQKFGLYEDLTVMENLNLYADLRSVTGEARKQTFARLLEFTSLGPFTGRLAGKLSGGMKQKLGLACTLVGEPKVLLLDEPGVGVDPISRRELWQMVHELAGEGMLILWSTSYLDEAEQCRDVLLMNEGELLYQGEPKALTQTMAGRSFLMTSPHEGNRKLLQRALKLPQVSDGMIQGKSVRLILKKEATPDDIRHADGMPEININETTPRFEDAFIDLLGGAGTSESPLGAILHTVEGTPGETVIEAKELTKKFGDFAATDHVNFAVKRGEIFGLLGPNGAGKSTTFKMMCGLLVPTSGQALVLGMDLKESSGKARQHLGYMAQKFSLYGNLTVEQNLRFFSGVYGLRGRAQNEKISRMSEAFGLKSIASHATDELPLGFKQRLALACSLMHEPDILFLDEPTSGVDPLTRREFWLHINSMVEKGVTVMVTTHFMDEAEYCDRIGLVYRGKLIASGTPDDLKAQSANDEQPDPTMEQAFIQLIHDWDKEHSNE

SEQ ID NO: 334 - protein, 86 aa, Escherichia coli
MKTINTVVAAMALSALSFGVFAAEPVTASQAQNMNKIGVVSADGASTLDALEAKLAEKAAAAGASGYSITSATNNNKLSGTAVIYK

SEQ ID NO: 335 - protein, 760 aa, Escherichia coli
MENNRNFPARQFHSLTFFAGLCIGITPVAQALAAEGQTNADDTLVVEASTPSLYAPQQSADPKFSRPVADTTRTMTVISEQVIKDQGATNLTDALKNVPGVGAFFAGENGNSTTGDAIYMRGADTSNSIYIDGIRDIGSVSRDTFNTEQVEVIKGPSGTDYGRSAPTGSINMISKQPRNDSGIDASASIGSAWFRRGTLDVNQVIGDTTAVRLNVMGEKTHDAGRDKVKNERYGVAPSIAFGLGTANRLYLNYLHVTQHNTPDGGIPTIGLPGYSAPSAGTATLNHSGKVDTHNFYGTDSDYDDSTTDTATMRFEHDINDNTTIRNTTRWSRVKQDYLMTAIMGGASNITQPTSDVNSWTWSRTANTKDVSNKILTNQTNLTSTFYTASIGHDVSTGVEFTRETQTNYGVNPVTLPAVNIYHPDSSIHPGGLTRNGANANGQTDTFAIYAFDTLQITRDFELNGGIRLDNYHTEYDSATACGGSGRGAITCPAGVAKGSPVTTVDTAKSGNLVNWKAGALYHLTENGNVYINYAVSQQPPGGNNFALAQSGSGNSANRTDFKPQKANTSEIGTKWQVLDKRLLLTAALFRTDIENEVEQNDDGTYSQYGKKRVEGYEISVAGNITPAWQVIGGYTQQKATIKNGKDVAQDGSSSLPYTPEHAFTLWSQYQATDDISVGAGARYIGSMHKGSDGAVGTPAFTEGYWVADAKLGYRVNRNLDFQLNVYNLFDTDYVASINKSGYRYHPGEPRTFLLTANMHF

SEQ ID NO: 336 - protein, 240 aa, Escherichia coli
MTPTIELTCGHRSIRHFTDEPISEAQREAIINSARATSSSSFLQCSSIIRITDKALREELVTLTGGQKHVAQAAEFWVFCADFNRHLQICPDAQLGLAEQLLLGVVDTAMMAQNALTAAESLGLGGVYIGGLRNNIEAVTKLLKLPQHVLPLFGLCLGWPADNPDLKPRLPSSILVHENSYQPLDKDALAQYDEQLAEYYLTRGSNNRRDTWSDHIRRTIIKESRPFILDYLHKQGWATR

SEQ ID NO: 337 - protein, 349 aa, Escherichia coli
MRTSFSQQQWIDMKVLVTGATSGLGRNAVEFLCQKGISVRATGRNEAMGKLLEKMGAEFVPADLTELVSSQAKVMLAGIDTLWHCSSFTSPWGTQQAFDLANVRATRRLGEWAVAWGVRNFIHISSPSLYFDYHHHRDIKEDFRPHRFANEFARSKAASEEVINMLSQANPQTRFTILRPQSLFGPHDKVFIPRLAHMMHHYGSILLPHGGSALVDMTYYENAVHAMWLASQEACDKLPSGRVYNITNGEHRTLRSIVQKLIDELNIDCRIRSVPYPMLDMIARSMERLGRKSAKEPPLTHYGVSKLNFDFTLDITRAQEELGYQPVITLDEGIEKTAAWLRDHGKLPR

SEQ ID NO: 338 - protein, 285 aa, Escherichia coli
VKADNPFDLLLPAAMAKVAEEAGVYKATKHPLKTFYLAITAGVFISIAFVFYITATTGTGTMPFGMAKLVGGICFSLGLILCVVCGADLFTSTVLIVVAKASGRITWGQLAKNWLNVYFGNLVGALLFVLLMWLSGEYMTANGQWGLNVLQTADHKVHHTFIEAVCLGILANLMVCLAVWMSYSGRSLMDKAFIMVLPVAMFVASGFEHSIANMFMIPMGIVIRDFASPEFWTAVGSAPENFSHLTVMNFITDNLIPVTIGNIIGGGLLVGLTYWVIYLRENDHH

SEQ ID NO: 339 - protein, 720 aa, Escherichia coli
MAFMLSPLLKRYTWNSAWLYYARIFIALCGTTAFPWWLGDVKLTIPLTLGMVAAALTDLDDRLAGRLRNLIITLFCFFIASASVELLFPWPWLFAIGLTLSTSGFILLGGLGQRYATIAFGALLIAIYTMLGTSLYEHWYQQPMYLLAGAVWYNVLTLIGHLLFPVRPLQDNLARCYEQLARYLELKSRMFDPDIEDESQAPLYDLALANGLLMATLNQTKLSLLTRLRGDRGQRGTRRTLHYYFVAQDIHERASSSHIQYQTLREHFRHSDVLFRFQRLMSMQGQACQQLSRCILLRQPYQHDPHFERAFTHIDAALERMRDNGAPADLLKTLGFLLNNLRAIDAQLATIESEQAQALPHNNDENELADDSPHGLSDIWLRLSRHFTPESALFRHAVRMSLVLCFGYAIIQITGMHHGYWILLTSLFVCQPNYNATRHRLKLRIIGTLVGIAIGIPVLWFVPSLEGQLVLLVITGVLFFAFRNVQYAHATMFITLLVLLCFNLLGEGFEVALPRVIDTLIGCAIAWAAVSYIWPDWQFRNLPRMLERATEANCRYLDAILEQYHQGRDNRLAYRIARRDAHNRDAELASVVSNMSSEPNVTPQIREAAFRLLCLNHTFTSYISALGAHREQLTNPEILAFLDDAVCYVDDALHHQPADEERVNEALASLKQRMQQLEPRADSKEPLVVQQVGLLIALLPEIGRLQRQITQVPQETPVSA

SEQ ID NO: 340 - protein, 698 aa, Escherichia coli
MKKNSYLLSCLAIAVSSACHAEVLTYPDPLGSSQSDFGGTGLLQMPNARIAPEGEFSVNYRDNDQYRFYSTSVALFPWLEGTIRYTDVRTRKYSQWEDFSGDQSYKDKSFDFKLRLWEEGYWLPQVAFGKRDIAGTGLFDGEYLVASKQAGPFDFTLGMAWGYAGNAGNITNPFCRVSDKYCHRAESHDAGDISFSDIFRGPASIFGGIEYQTPWNPLRLKLEYDGNNYQNDFAGKLPQASHFNVGAVYRAASWADLNLSYERGNTLMFGFTLRTNFNDLRPALRDTPKPAYQPAPESEGLQYTTVANQLTALKYNAGFDAPEIQLRDKTLYMSGQQYKYRDSREAVDRANRILVNNLPQGVEKISVTQKREHMAMVTTETDVASLRKQLAGTAPGQSEPLQQQRVEAEDLSAFGRGYRIREDRFSYSFNPTLSQSLGGPEDFYMFQLGLMSSARYWFTDHLLLDGGIFTNIYNNYDKFKSSLLPADSTLPRVRTHIRDYVRNDVYLNNLQANYFADLGNGFYGQVYGGYLETMYAGVGSELLYRPLDASWALGVDVNYVKQRDWDNMMRFTDYSTPTGFVTAYWNPPTLNGVLMKLSVGQYLAKDKGATIDVAKRFDSGVAVGVWAAISNVSKDDYGEGGFSKGFYISIPFDLMTIGPNRNRAVVSWTPLTRDGGQMLSRKYQLYPMTAEREVPVGQ

SEQ ID NO: 341 - protein, 73 aa, Escherichia coli
MAQPFQQSSIVIPVHPRECGQFHFCTVFPALTVYYLRFVKTIDALRHRVVSKRKLTAVCSHQTKIGNLDAHLI

SEQ ID NO: 342 - protein, 350 aa, Escherichia coli
MPVLHNRISNDALKAKMLAESEPRTTISFYKYFHIADPKATRDALYQLFTALNVFGRVYLAHEGINAQISVPASNVKTFRAQLYAFDSALDGLRLNIALDDDGKSFWVLRMKVRDRIVADGIDDPHFDASNVGEYLQAAEVNAMLDDPDALFIDMRNHYEYEVGHFENALEIPADTFREQLPKAVEMMQAHKDKKIVMYCTGGIRCEKASAWMKHNGFNKVWHIEGGIIEYARKAREQGLPVRFIGKNFVFDERMGERISDEIIAHCHQCGAPCDSHTNCKNDGCHLLFIQCPVCAEKYKGCCSEICCEESALPPEEQRRRRAGRENGNKIFNKSRGRLNTTLGIPDPTE

SEQ ID NO: 343 - protein, 1061 aa, Escherichia coli
MKRMLINATQQEELRVALVDGQRLYDLDIESPGHEQKKANIYKGKITRIEPSLEAAFVDYGAERHGFLPLKEIAREYFPANYSAHGRPNIKDVLREGQEVIVQIDKEERGNKGAALTTFISLAGSYLVLMPNNPRAGGISRRIEGDDRTELKEALASLELPEGMGLIVRTAGVGKSAEALQWDLSFRLKHWEAIKKAAESRPAPFLIHQESNVIVRAFRDYLRQDIGEILIDNPKVLELARQHIAALGRPDFSSKIKLYTGEIPLFSHYQIESQIESAFQREVRLPSGGSIVIDSTEALTAIDINSARATRGGDIEETAFNTNLEAADEIARQLRLRDLGGLIVIDFIDMTPVRHQRAVENRLREAVRQDRARIQISHISRFGLLEMSRQRLSPSLGESSHHVCPRCSGTGTVRDNESLSLSILRLIEEEALKENTQEVHAIVPVPIASYLLNEKRSAVNAIETRQDGVRCVIVPNDQMETPHYHVLRVRKGEETPTLSYMLPKLHEEAMALPSEEEFAERKRPEQPALATFAMPDVPPAPTPAEPAAPVVAPAPKAAPATPATPAQPGLLSRFFGALKALFSGGEETKPTEQPAPKAEAKPERQQDRRKPRQNNRRDRNERRDTRSERTEGSDNREENRRNRRQAQQQTAETREGRQQAEVTEKARTADEQQAPRRERSRRRNDDKRQAQQEAKALNVEEQSVQETEQEERVRPVQPRRKQRQLNQKVRYEQSVAEETVVAPVAEETVAAEPIVQEAPAPRTELVKVPLPVVAQTAPEQQEENNADNRDNGGMPRRSRRSPRHLRVSGQRRRRYRDERYPTQSPMPLTVACASPELASGKVWIRYPIVRPQDVQVEEQREQEEVQVQPMVTEVPVAAAVEPVVSAPVVEEMAEVVEAPVPVAEPQPEVVETTHPEVIAAAVTEQPQVITESDVAVAQEVAEHAEPVVEPQEETADIEEVAETAEVVVAEPEVVAQPAAPVVAEVAAEVETVTAVKPEITVEHNHATAPMTRAPAPEYVPEAPRHSDWQRPTFAFEGKGAAGGHTATHHASAAPARPQPVE

SEQ ID NO: 344 - protein, 192 aa, Escherichia coli
MAIKGLEQAVENLSRISKTAVPGASAMAINRVASSAISQSASQVARETRVRRKLVKERARLKRATVKNPQARIKVNRGDLPVIKLGNARVVLSRRRRRKKGQRSSLKGGGSVLVVGNRRIPGAFIQQLKNGRWHVMQRVAGKNRYPIDVVKIPMAVPLTTAFKQNIERIRRERLPKELGYALQHQLRMVIKR

SEQ ID NO: 345 - protein, 849 aa, Escherichia coli
MAEPVGDLVVDLSLDAARFDEQMARVRRHFSGTESDAKKTAAVVEQSMSRQALAAQKAGISVGQYKAAMRMLPAQFTDVATQLAGGQSPWLILLQQGGQVKDSFGGMIPMFRGLAGAITLPMVGATSLAVATGALAYAWYQGNSTLSDFNKTLVLSGNQAGLTADRMLVLSRAGQAAGLTFNQTSESLSALVKAGVSGEAQIASISQSVARFSSASGVEVDKVAEAFGKLTTDPTSGLTAMARQFHNVTAEQIAYVAQLQRSGEEAGALQAANEAATKGFDDQTRRLKENMGTLETWADRTARAFKSMWDAVLDIGRPDTAQEMLIKAEAAFKKADDIWNLRKDDYFVNDEARARYWDDREKARLALEAARKKAEQQSQQDKNAQQQSDTEASRLKYTEEAQKAYERLQTPLEKYTARQEELNKALKDGKILQADYNTLMAAAKKDYEATLKKPKQSGVKVSAGDRQEDSAHAALLTLQAELRMLEKHAGANEKISQQRRDLWKAESQFAVLEEAAQRRQLSAQEKSLLAHKDETLEYKRQLAVLGDKVTYQEHLNALAQQADKFAQQQRAKRAAIDAKNRGLTDRQAAREATEQRLKEQYGDNPLALNNVMSEQKKTWAAEDQLRGSWMAGLRSGWSEWEESATDSMSQVKSAATQTFDGIAQNMAAMLTGSEQNWRSFTRSVLSMMTEILLKQAMVGIVGSIGSAIGGGASASGGTAIQAAAAKFHFAAGGFTGTGGKYEPAGIVHRGEFVFTKEATSRIGVGNLYRLMRGYATGGYVGTPGSMADSRSQASGTFEQNNHVVINNDGTNGQIGPQALKAVYDVARKAAMDVVTGQMRDGGLFSGGGR

SEQ ID NO: 346 - protein, 247 aa, Escherichia coli
MTQTESAILAHARRCAPAESCGFVVSTPEGERYFPCVNISGEPEAYFRMSPEDWLQAEMQGEIVALVHSHPGGLPWLSEADRRLQVQSDLPWWLVCRGTIHKFRCVPHLTGRRFEHGVTDCYTLFRDAYHLAGIEMPDFHREDDWWRHGQNLYLDNLEATGLYQVPLSSAQPGDVLLCCFGSSVPNHAAIYCGDGELLHHIPEQLSKRERYTDKWQRRTHSLWRHRAWRASAFTGICNDLAAASTFV

SEQ ID NO: 347 - protein, 971 aa, Escherichia coli
MAVKISGVLKDGTGKPVENCTIQLKARRNSATVVVNTVASENPDEAGRYSMDVEYGQYSVILLVEGFPPSHAGTITVYEDSQPGTLNDFLGAMTEDDVRPEALRRFELMVEEVARNASAVAQNTAAAKKSASDASTSAREAATHATDAADSARAASTSAGQAASSAQSASSSAGTASTKATEASKSAAAAESSKSAAATSAGAAKTSETNAAVSQQSAATSASTATTKASEAASSARDASASKEAAKSSETSAASSASSAASSATAAGNSAKAAKTSETNAKSSETAAEQSASAAAGSKTAAALSASAASTSAGQASASATAAGKSAESAASSASTATTKAGEATEQASAAASSASAAKTSETNAKASETSAESSKTAAASSASSAASSASSASASKDEATRQASAAKSSATTASTKATEAAGSATAAAQSKSTAESAATRAETAAKRAEDIASAVALEDASTTKKGIVQLSSATNSTSESLAATPKAVKAAYELANGKYTAQDATTAQKGIVQLSNATNSTSEMLAATPKSVKAAYDLANGKYTAQDATTAQKGIVQLSSATNSASETLAATPKAVKAANDNANGRVPSARKVNGKALSSDITLTPKDIGTLNSTTMSFSGGAGWFKLATVTMPQASSVVSITLIGGAGFNVGSPQQAGISELVLRAGNGNPKGITGALWQRTSTGFTNFAWVNTSGDTYDIYVAIGNYATGVNIQWDYTSNASVTIHTSPAYSANKPEGLTDGTVYSLYTPSEQFYPPGAPIPWPSDTVPSGYALMQGQTFDKSAYPKLAAAYPSGVIPDMRGWTIKGKPASGRAVLSQEQDGIKSHTHSASASSTDLGTKTTSSFDYGTKSTNNTGAHTHSVSGTAASAGNHTHSVTGASAVSQWSQNGSVHKVVSAASVNTSAAGAHTHSVSGTAASAGAHAHTVGIGAHTHSVAIGSHGHTITVNAAGNAENTVKNIAFNYIVRLA

SEQ ID NO: 348 - protein, 314 aa, Escherichia coli
VATIAFQGNLAGIMRKIKIGLALGSGAARGWSHIGVINALKKVGIEIDIVAGCSIGSLVGAAYACDRLSALEDWVTSFSYWDVLRLMDLSWQRGGLLRGERVFNQYREIMPETEIENCSRRFAAVATNLSTGRELWFTEGDLHLAIRASCSIPGLMAPVAHNGYWLVDGAVVNPIPISLTRALGADIVIAVDLQHDAHLMQQDLLSFNVSEENSENGDSLPWHARLKERLGSITTRRAVTAPTATEIMTTSIQVLENRLKRNRMAGDPPDILIQPVCPQISTLDFHRAHAAIAAGQLAVEKKMDELLPLVRTNI

SEQ ID NO: 349 - protein, 239 aa, Escherichia coli
MTLDLPRRFPWPTLLSVCIHGAVVAGLLYTSVHQVIELPAPAQPISVTMVAPADLEPPQAVQPPPEPVVEPEPEPEPIPEPPKEAPVVIEKPKPKPKPKPKPVKKVQEQQKRDVKPVESRPASPFENTAPARPTSSTATAATSKPVTSVASGPRALSRNQPQYPARAQALRIEGQVKVKFDVTPDGRVDNVQILSAKPANMFEREVKNAMRRWRYEPGKPGSGIVVNILFKINGTTEIQ

SEQ ID NO: 350 - protein, 262 aa, Escherichia coli
LIIRKICTTLPVILPEPETIMTVTRPRAERGAFPPGTEHYGRSLLGAPLIWFPAPAASRESGLILAGTHGDENSSVVTLSCALRTLTPSLRRHHVVLCVNPDGCQLGLRANANGVDLNRNFPAANWKEGETVYRWNSAAEERDVVLLTGDKPGSEPETQALCQLIHRIQPAWVVSFHDPLACIEDPRHSELGEWLAQAFELPLVTSVGYETPGSFGSWCADLNLHCITAEFPPISSDEASEKYLFAMANLLRWHPKDAIRPS

SEQ ID NO: 351 - protein, 546 aa, Escherichia coli
MNTTPSQRLGFLHHIRLVPLFACILGGILVLFALSSALAGYFLWQADRDQRDVTAEIEIRTGLANSSDFLRSARINMIQAGAASRIAEMEAMKRNIAQAESEIKQSQQGYRAYQNRPVKTPADEALDTELNQRFQAYITGMQPMLKYAKNGMFEAIINHESEQIRTLDNAYTDILNKAVKIRSTRANQLAELAHQRTRLGGMFMIGAFVLALVMTLITFMVLRRIVIRPLQHAAQRIEKIASGDLTMKDEPAGRNEIGRLSRHLQQMQHSLGMTVGTVRQGAEEIYRGTSEISAGNADLSSRTEEQAAAIEQTAASMEQLTATVKQNADNAHYASKLAQEASIKASDGGQTVSGVVKTMGAISTSSKKISEITAVINSIAFQTNILALNAAVEAARAGEQGRGFAVVASEVRTLASRSAQAAKEIEGLISESVRLIDLGSDEVATAGKTMSTIVDAVASVTHIMQEIAAASDEQSRGITQVSQAISEMDKVTQQNASLVEEASAAAVSLEEQAARLTEAVDVFRLNKQSVLAEPRGAGEPVSFAPV

SEQ ID NO: 352 - protein, 222 aa, Escherichia coli
MRTTSFAKVAALCGLLALSGCASKITQPDKYSGFLNNYSDLKETTSATGKPVLRWVDPSFDQSKYDSIVWNPITYYPVPKPSTQVGQKVLDKILNYTNTEMKEAIAQRKPLVTTAGPRSLIFRGAITGVDTSKEGLQFYEVVPVALVVAGTQMATGHRTMDTRLYFEGELIDAATNKPVIKVVRQGEGKDLNNESTPMAFENIKQVIDDMATDATMFDVNKK

SEQ ID NO: 353 - protein, 178 aa, Escherichia coli
MENLARFLSTTLKQLRQQRGWSLSRLAEATGVSKAMLGQIERNESSPTVATLWKIATGLNVPFSTFISPPQSATPSVYDPQQQAMVIISLFPYDPQLCFEHFSIQMAPGAISESTPHEKGVIEHVVVIDGQLDLCVDGEWQTLNCGEGVRFAADVTHIYRNGGEQTVHFHSLIHYPRS

SEQ ID NO: 354 - protein, 381 aa, Escherichia coli
MSKTFARSSLCALSMTIMTAHAAEPPTNLDKPEGRLDIIAWPGYIERGQTDKQYDWVTQFEKETGCAVNVKTAATSDEMVSLMTKGGYDLVTASGDASLRLIMGKRVQPINTALIPNWKTLDPRVVKGDWFNVGGKVYGTPYQWGPNLLMYNTKTFPTPPDSWQVVFVEQNLQDGKSNKGRVQAYDGPIYIADAALFVKATQPQLGISDPYQLTEEQYQAVLKVLRDQHSLIHRYWHDTTVQMSDFKNEGVVASSAWPYQTNALKAEGQPVATVFPKEGVTGWADTTMLHSEAKHPVCAYKWMNWSLTPKVQGDVAAWFGSLPVVPEGCKASSLLGEKGCETNGFNYFDKIAFWKTPIAEGGKFVPYSRWTQDYIAIMGGR

SEQ ID NO: 355 - protein, 474 aa, Escherichia coli
MQHKLLINGELVSGEGEKQPVYNPATGDVLLEIAEASAEQVDAAVRAADAAFAEWGQTTPKVRAECLLKLADVIEENGQVFAELESRNCGKPLHSAFNDEIPAIVDVFRFFAGAARCLNGLAAGEYLEGHTSMIRRDPLGVVASIAPWNYPLMMAAWKLAPALAAGNCVVLKPSEITPLTALKLAELAKDIFPAGVINVLFGRGKTVGDPLTGHPKVRMVSLTGSIATGEHIISHTAPSIKRTHMELGGKAPVIVFDDADIEAVVEGVRTFGYYNAGQDCTVACRIYAQKGIYDTLVEKLGAAVATLKSGAPDDESTELGPLSSLAHLERVSKAVEEAKATGHIKVITGGEKRKGNGYYYAPTLLAGALQDDAIVQKEVFGPVVSVTLFDNEEQVVNWANDSQYGLASSVWTKDVGRAHRVSARLQYGCTWVNTHFMLVSEMPHGGQKLSGYGKDMSLYGLEDYTVVRHVMVKH

SEQ ID NO: 356 - protein, 203 aa, Escherichia coli
MRDCHSSDDKDVIAIDGKTLRHSYDKSRRRGAIHVISAFSTMHSLVIGQIKTDEKSNEITAIPELLNMLDIKGKIITTDAMGCQKDIAEKIQKQGGDYLFAVKGNQGRLNKAFEEKFPLKELNNPEHDSYAISEKSHGREEIRLHIVCDVPDELIDFTFEWKGLKKLCVAVSFRSIIAEQQNSRTAEQKKEPKNDGQILYQFC

SEQ ID NO: 357 - protein, 516 aa, Escherichia coli
MKRSISFRPTLLALVLATTFPVAHAAVPKDMLVIGKAADPQTLDPAVTIDNNDWTVTYPSYQRLVQYKTDGDKGSTDVEGDLASSWKASNDQKEWTFTLKDNAKFADGTPVTAEAVKLSFERLLKIGQGPAEAFPKDLKIDAPDEHTVKFTLSQPFAPFLYTLANDGASIINPAVLKEHAADDARGFLAQNTAGSGPFMLKSWQKGQQLVLVPNPHYPGNKPNFKRVSVKIIGESASRRLQLSRGDIDIADALPVDQLNALKQENKVNVAEYPSLRVTYLYLNNSKAPLNQADLRRAISWSTDYQGMVNGILSGNGKQMRGPIPEGMWGYDATAMQYNHDETKAKAEWDKVTSKPTSLTFLYSDNDPNWEPIALATQSSLNKLGINVKLEKLANATMRDRVGKGDYDIAIGNWSPDFADPYMFMNYWFESDKKGLPGNRSFYENSEVDKLLRNALATTDQTQRTRDYQQAQKIVIDDAAYVYLFQKNYQLAMNKEVKGFVFNPMLEQVFNINTMSK

SEQ ID NO: 358 - protein, 931 aa, Escherichia coli
MEIIMRNLCFLLTLVATLLLPGRLIAAALPQDEKLITGQLDNGLRYMIYPHAHPKDQVNLWLQIHTGSLQEEDNERGVAHFVEHMMFNGTKTWPGNKVIETFESMGLRFGRDVNAYTSYDETVYQVSLPTTQKQNLQQVMAIFSEWSNAATFEKLEVDAERGVITEEWRAHQDAKWRTSQARRPFLLANTRNLDREPIGLMDTVATVTPAQLLQFYQRWYQPNNMTFIVVGDIDSKEALALIKDNLSKLPANKAAENRVWPTKAENHLRFNIINDKENRVNGIALYYRLPMVQVNDEQSFIEQAEWSMLVQLFNQRLQERIQSGELKTISGGTARSVKIAPDYQSLFFRVNARDDNMQDAANALMEELATIDQHGFSAEELDDVKSTRLTWLKNAVDQQAERDLRMLTSRLASSSLNNTPFLSPEETYQLSKRLWQQITVQSLAEKWQQLRKNQDAFWEQMVNNEVAAKKALSPAAILALEKEYANKKLAAYIFPGRNLSLTVDADPQAEISSKETLAENLTSLTLSNGARVILAKSAGEEQKLQIIAVSNKGDLSFPAQQKSLIALANKAVSGSGVGELSSSSLKRWSAENSVTMSSKVSGMNTLLSVSARTNNPEPGFQLINQRITHSTINDNIWASLQNAQIQALKTLDQRPAEKFAQQMYETRYADDRTKLLQENQIAQFTAADALAADRQLFSSPADITFVIVGNVAEDKLVALITRYLGSIKHSDSPLAAGKPLTRATDNASVTVKEQNEPVAQVSQWKRYDSRTPVNLATRMALDAFNVALAKDLRVNIREQASGAYSVSSRLSVDPQAKDISHLLAFTCQPERHDELLTLANEVMVKRLTKGISEQELNEYQQNVQRSLDIQQRSVQQLANTIVNSLIQYDDPAAWTEQEQLLKQMTVENVNTAVKQYLSHPVNTYTGVLLPK

SEQ ID NO: 359 - protein, 68 aa, Escherichia coli
MTRQEELAAARAALHDLMTGKRVATVQKDGRRVEFTTTSVSDLKKYIAELEVQTGMTQRRRGPAGFYV

SEQ ID NO: 360 - protein, 390 aa, Escherichia coli
MFDFSKVVDRHGTWCTQWDYVADRFGTADLLPFTISDMDFATAPCIIEALNQRLMHGVFGYSRWKNDEFLAAIAHWFSTQHYTAIDPQSVVYGPSVIYMVSELIRQWSETGEGVVIHTPAYDAFYKAIEGNQRTVMPVALEKQADGWFCDMGKLEAVLAKPECKIMLLCSPQNPTGKVWTCDELEIMADLCERHGVRVISDEIHMDMVWGEQPHIPWSNVARGDWALLTSGSKSFNIPALTGAYGIIENSSSRDAYLSALKGRDGLSSPSVLALTAHIAAYQQGAPWLDALRVYLKDNLTYIADKMNAAFPELNWQIPQSTYLAWLDLRPLNIDDNALQKALIEQEKVAIMPGYTYGEEGRGFVRLNAGCPRSKLEKGVAGLINAIRAVR

SEQ ID NO: 361 - protein, 1538 aa, Escherichia coli
MADNPNPSSPLPDVFSPATRDWFLRAFKQPTAVQSQTWHVAARGEHALVIAPTGSGKTLAAFLYALDRLFREGGEDTREAHKRKTSRILYISPIKALGTDVQRNLQIPLKGIADERRRRGETEVNLRVGIRTGDTPAQERSKLTRNPPDILITTPESLYLMLTSRARETLRGVETVIIDEVHAVAGSKRGAHLALSLERLDALLHTSAQRIGLSATVRSASDVAAFLGGDRPVTVVNPPAMRHPQIRIVVPVANMDDVSSVASGTGEDSHAGREGSIWPYIETGILDEVLRHRSTIVFTNSRGLAEKLTARLNELYAARLQRSPSIAADAAHFESTSGATSNRVQSSDVFIARSHHGSVSKEQRAITEQALKSGELRCVVATSSLELGIDMGAVELVIQVATPLSVASGLQRIGRAGHQIGGISKGLFFPRTRRDLVDSAVIVECMFAGRLENLTPPHNPLDVLAQHTVAAAAMDALQVDEWYSRVRRAAPWKDLPRRVFDATLDMLSGRYPSGDFSAFRPKLVWNRETGILTARPGAQLLAVTSGGTIPDRGMYSVLLPEGEEQAGSRRVGELDEEMVYESRVNDIITLGATSWRIQQITRDQVIVTPAPGRSARLPFWRGEGNGRPAELGEMIGDFLHLLADGAFFSGTIPPWLAEENTIANIQGLIDEQRNATGIVPGSRHLVLERCRDEIGDWRIILHSPYGRRVHEPWALAIAGRIHALWGADASVVASDDGIVARIPDTDGKLPDAAIFLFEPEKLLQIVREAVGSSALFAARFRECAARALLMPGRTPGHRTPLWQQRLRASQLLEIAQGYPDFPAILETLRECLQDVYDLPALERLMRRLNGGEIQISDVTTTTPSPFATSLLFGYVAEFMYQSDAPLAERRASVLSLDSELLRNLLGQVDPGELLDPQVIRQVEEELQRLAPGRRAKGEEGLFDLLRELGPMTVEDLAQRHTGSSEEIASYLENLLTVKRIFPTMISGQERLACMDDAARLRDALGVRLPESLPEIYLHRVSYPLRDLFLRYLRAHALVTAEQLAHEFSLGIAIVEEQLQQLREQGLVMNLQQDIWVSDEVFRRLRLRSLQAAREATRPVAATTYARLLLERQGVLPATDGSPALFASTSPGVYEGVDGVMRVIEQLAGVGLPASLWESQILPARVHDYSPEVLDELLATGAVIWSGQKKLGEDDGLVALHLQEYAAESFTPAEADQANRSALQQAIVAVLADGGAWFAQQISQRIRDKIGESVDPSALQEALWALVWQGVITSDIWAPLRALTRSSSNARTSTRRSHRARRGRPVYAQPVSPRVSYNTPNLAGRWSLLQVEPLNDTERMLALAENMLDRYGIISRQAVIAENIPGGFPSMQTLCRSMEDSGRIMRGRFVEGLGGAQFAERLTIDRLRDLATQAAQTRHYTPVALSANDPANVWGNLLPWPAHPATLVPTRRAGALVVVSGGKLLLYLAQGGKKMLVWQEKEELLAPEVFHALTTALRREPRLRFTLTEVNDLPVWQTPMFTLLREAGFSSSPQGLDWG

SEQ ID NO: 362 - protein, 271 aa, Escherichia coli
VARINRISITLCALLFTTLPLTPMAHASKQARESSATTHITKKADKKKSTATTKKTQKTAKKAASKSTTKSKTASSVKKSSITASKNAKTRSKHTVNKTASASLTEKCTKRKGYKSHCVKVKNAASGTLADAHKAKVQKATKVAMNKLMQQIGKPYRWGGSSPRTGFDCSGLVYYAYKDLVKIRIPRTANEMYHLRDAAPIERSELKNGDLVFFRTQGRGTADHVGVYVGNGKFIQSPRTGQEIQITSLSEDYWQRHYVGARRVMTPKTLR

SEQ ID NO: 363 - protein, 248 aa, Escherichia coli
MLSIKDLHVSVEDKAILRGLSLDVRPGEVHAIMGPNGSGKSTLSATLAGREDYEVTGGTVEFKGKDLLALSPEDRAGEGIFMAFQYPVEIPGVSNQFFLQTALNAVRSYRGQETLDRFDFQDLMEEKIALLKMPEDLLTRSVNVGFSGGEKKRNDILQMAVLEPELCILDESDSGLDIDALKVVADGVNSLRDGKRSFIIVTHYQRILDYIKPDYVHVLYQGRIVKSGDFTLVKQLEEQGYGWLTEQQ

SEQ ID NO: 364 - protein, 1018 aa, Escherichia coli
MIPQISQAPGVVQLVLNFLQELEQQGFTGDTATSYADRLTMSTDNSIYQLLPDAVVFPRSTADVALIARLAAQERYSSLIFTPRGGGTGTNGQALNQGIIVDMSRHMNRIIEINPEEGWVRVEAGVIKDQLNQYLKPFGYFFAPELSTSNRATLGGMINTDASGQGSLVYGKTSDHVLGLRAVLLGGDILDTQPLPVELAETLGKSNTTIGRIYNTVYQRCRQQRQLIIDNFPKLNRFLTGYDLRHVFNDEMTEFDLTRILTGSEGTLAFITEARLDITRLPKVRRLVNVKYDSFDSALRNAPFMVEARALSVETVDSKVLNLAREDIVWHSVSELITDVPDKEMLGLNIVEFAGDDEALIDERVNALCARLDELIASHQAGVIGWQMCRELAGVERIYAMRKKAVGLLGNAKGAAKPIPFAEDTCVPPEHLADYIAEFRALLDSHGLSYGMFGHVDAGVLHVRPALDMCDPQQEILMKQISDDVVALTAKYGGLLWGEHGKGFRAEYSPAFFGEELFAELRKVKAAFDPHNRLNPGKICPPEGLDAPMMKVDAVKRGTFDRQIPIAVRQQWRGAMECNGNGLCFNFDARSPMCPSMKITQNRIHSPKGRATLVREWLRLLADRGVDPLKLEQELPESGVSLRTLIARTRNSWHANKGEYDFSHEVKEAMSGCLACKACSTQCPIKIDVPEFRSRFLQLYHTRYLRPLRDHLVATVESYAPLMARAPKTFNFFINQPLVRKLSEKHIGMVDLPLLSVPSLQQQMVGHRSANMTLEQLESLNAEQKARTVLVVQDPFTSYYDAQVVADFVRLVEKLGFQPVLLPFSPNGKAQHIKGFLNRFAKTAKKTADFLNRMAKLGMPMVGVDPALVLCYRDEYKLALGEERGEFNVLLANEWLASALESQPVATVSGESWYFFGHCTEVTALPGAPAQWAAIFARFGAKLENVSVGCCGMAGTYGHEAKNHKNSLGIYELSWHQAMQRLPRNRCLATGYSCRSQVKRVEGTGVRHPVQALLEIIK

SEQ ID NO: 365 - protein, 447 aa, Escherichia coli
MDQTYSLESFLNHVQKRDPNQTEFAQAVREVMTTLWPFLEQNPKYRQMSLLERLVEPERVIQFRVVWVDDRNQVQVNRAWRVQFSSAIGPYKGGMRFHPSVNLSILKFLGFEQTFKNALTTLPMGGGKGGSDFDPKGKSEGEVMRFCQALMTELYRHLGADTDVPAGDIGVGGREVGFMAGMMKKLSNNTACVFTGKGLSFGGSLIRPEATGYGLVYFTEAMLKRHGMGFEGMRVSVSGSGNVAQYAIEKAMEFGARVITASDSSGTVVDESGFTKEKLARLIEIKSSRDGRVADYAKEFGLVYLEGQQPWSVPVDIALPCATQNELDVDAAHQLIANGVKAVAEGANMPTTIEATELFQQAGVLFAPGKAANAGGVATSGLEMAQNAARLGWKAEKVDARLHHIMLDIHHACVEHGGEGEQTNYVQGANIAGFVKVADAMLAQGVI

SEQ ID NO: 366 - protein, 248 aa, Escherichia coli
VTKLKLLALGVLIATSAGVAHAEGKFSLGAGVGVVEHPYKDYDTDVYPVPVINYEGDNFWFRGLGGGYYLWNDATDKLSITAYWSPLYFKAKDSGDHQMRHLDDRKSTMMAGLSYAHFTQYGYLRTTLAGDTLDNSNGIVWDMAWLYRYTNGGLTVTPGIGVQWNSENQNEYYYGVSRKESARSGLRGYNSNDSWSPYLELSASYNFLGDWSVYGTARYTRLSDEVTDSPIVDKSWTGLISTGITYKF

SEQ ID NO: 367 - protein, 323 aa, Escherichia coli
VTIAIVIGTHGWAAEQLLKTAEMLLGEQENVGWIDFVPGENAETLIEKYNAQLAKLDTTKGVLFLVDTWGGSPFNAASRIVVDKEHYEVIAGVNIPMLVETLMARDDDPSFDELVALAVETGREGVKALKAKPVEKAAPAPAAAAPKAAPTPAKPMGPNDYMVIGLARIDDRLIHGQVATRWTKETNVSRIIVVSDEVAADTVRKTLLTQVAPPGVTAHVVDVAKMIRVYNNPKYAGERVMLLFTNPTDVERLVEGGVKITSVNVGGMAFRQGKTQVNNAVSVDEKDIEAFKKLNARGIELEVRKVSTDPKLKMMDLISKIDK

SEQ ID NO: 368 - protein, 682 aa, Escherichia coli
MNMFFRLTALAGLLAIAGQTFAVEDITRADQIPVLKEETQHATVSERVTSRFTRSHYRQFDLDQAFSAKIFDRYLNLLDYSHNVLLASDVEQFAKKKTELGDELRSGKLDVFYDLYNLAQKRRFERYQYALSVLEKPMDFTGNDTYNLDRSKAPWPKNEAELNALWDSKVKFDELSLKLAGKTDKEIRETLTRRYKFAIRRLAQTNSEDVFSLAMTAFAREIDPHTNYLSPRNTEQFNTEMSLSLEGIGAVLQMDDDYTVINSMVAGGPAAKSKAISVGDKIVGVGQTGKPMVDVIGWRLDDVVALIKGPKGSKVRLEILPAGKGTKTRTVTLTRERIRLEDRAVKMSVKTVGKEKVGVLDIPGFYVGLTDDVKVQLQKLEKQNVSSVIIDLRSNGGGALTEAVSLSGLFIPAGPIVQVRDNNGKVREDSDTDGQVFYKGPLVVLVDRFSASASEIFAAAMQDYGRALVVGEPTFGKGTVQQYRSLNRIYDQMLRPEWPALGSVQYTIQKFYRVNGGSTQRKGVTPDIIMPTGNEETETGEKFEDNALPWDSIDAATYVKSGDLTAFEPELLKEHNARIAKDPEFQNIMKDIARFNAMKDKRNIVSLNYAVREKENNEDDATRLARLNERFKREGKPELKKLDDLPKDYQEPDPYLDETVNIALDLAKLEKARPAEQPAPVK

SEQ ID NO: 369 - protein, 585 aa, Escherichia coli
MAQVINTNSLSLITQNNINKNQSALSSSIERLSSGLRINSAKDDAAGQAIANRFTSNIKGLTQAARNANDGISVAQTTEGALSEINNNLQRIRELTVQATTGTNSDSDLDSIQDEIKSRLDEIDRVSGQTQFNGVNVLAKDGSMKIQVGANDGETITIDLKKIDSDTLGLNGFNVNGKGTITNKAATVSDLTSAGAKLNTTTGLYDLKTENTLLTTDAAFDKLGNGDKVTVGGVDYTYNAKSGDFTTTKSTAGTGVDAAAQAADSASKRDALAATLHADVGKSVNGSYTTKDGTVSFETDSAGNITIGGSQAYVDDAGNLTTNNAGSAAKADMKALLKAASEGSDGASLTFNGTEYTIAKATPATTTPVAPLIPGGITYQATVSKDVVLSETKAAAATSSITFNSGVLSKTIGFTAGESSDAAKSYVDDKGGITNVADYTVSYSVNKDNGSVTVAGYASATDTNKDYAPAIGTAVNVNSAGKITTETTSAGSATTNPLAALDDAISSIDKFRSSLGAIQNRLDSAVTNLNNTTTNLSEAQSRIQDADYATEVSNMSKAQIIQQAGNSVLAKANQVPQQVLSLLQG

SEQ ID NO: 370 - protein, 222 aa, Escherichia coli
MCGRFAQSQTREDYLALLAEDIERDIPYDPEPIGRYNVAPGTKVLLLSERDEHLHLDPVFWGYAPGWWDKPPLINARVETAATSRMFKPLWQHGRAICFADGWFEWKKEGDKKQPYFIYRADGQPVFMAAIGSTPFERGDEAEGFLIVTAAADQGLVDIHDRRPLVLSPEAARKWMRQEISGKEASEIAASGCVPANQFSWHPVSRAVGNVKNQGAELIQPV

SEQ ID NO: 371 - protein, 104 aa, Escherichia coli
MSAIQGIEGVISQLQATAMSARAQESLPQPTISFAGQLHAALDRISDTQTAARTQAEKFTLGEPGVALNDVMTDMQKASVSMQMGIQVRNKLVAAYQEVMSMQV

SEQ ID NO: 372 - protein, 472 aa, Escherichia coli
MQENISVTDSYSTGNAAQAMLEKLLQIYDVKTLVAQLNGVGENHWSAAILKRALANDSAWHRLSEKEFAHLQTLLPKPPAHHPHYAFRFIDLFAGIGGIRRGFESIGGQCVFTSEWNKHAVRTYKANHYCDPATHHFNEDIRDITLSHKEGVSDEAAAEHIRQHIPEHDVLLAGFPCQPFSLAGVSKKNSLGRAHGFACDTQGTLFFDVVRIIDARRPAMFVLENVKNLKSHDQGKTFRIIMQTLDELGYDVADAEDNGPDDPKIIDGKHFLPQHRERIVLVGFRRDLNLKADFTLRDISECFPAQRVTLAQLLDPMVEAKYILTPVLWKYLYRYAKKHQARGNGFGYGMVYPNNPQSVTRTLSARYYKDGAEILIDRGWDMATGEKDFDDPLNQQHRPRRLTPRECARLMGFEAPGEAKFRIPVSDTQAYRQFGNSVVVPVFAAVAKLLEPKIKQAVALRQQEAQHGRRSR

SEQ ID NO: 373 - protein, 1345 aa, Escherichia coli
LGVHTAEATLPNGNNDTKIVNIAPDASNAQVTLNIPAQQVVTNNSDSVQLTATVKDPSNHPVAGITVNFTMPQDVAANFTLENNGIAITQANGEAHVTLKGKKAGTHTVTATLSNNNTSDSQPVTFVADKTSALVVLQISKNEITGNGVDSATLTATVKDQFDNEVNNLPVTFSTASSGLTLTPGESNTNESGIAQATLAGVAFGEQTVTASLANNGASDNKTVHFIGDTAAAKIIELTPVPDSIIAGTPQNSSGSVITATVVDNNGFPVKGVTVNFTSNAATAEMTNGGQAVTNEQGKATVTYTNTRSSIESGARPDTVEASLENGSSTLSTSINVNADASTAHLTLLQALFDTVSAGDTTNLYIEVKDNYGNGVPQQEVTLSVSPSEGVTPSNNAIYTTNHDGNFYASFTATKAGVYQVTATLENGDSMQQTVTYVPNVANAEISLAASKDPVIANNNDLTTLTATVADTEGNAIANSEVTFTLPEDVRANFTLGDGGKVVTDTEGKAKVTLKGTKAGAHTVTASMAGGKSEQLVVNFIADTLTAQVNLNVTEDNFIANNVGMTRLQATVTDGNGNPLANEAVTFTLPADVSASFTLGQGGSAITDINGKAEVTLSGTKSGTYPVTVSVNNYGVSDTKQVTLIADAGTAKLASLTSVYSFVVSTTEGATMTASVTDANGNPVEGIKVNFRGTSVTLSSTSVETDDRGFAEILVTSTEVGLKTVSASLADKPTEVISRLLNAKADINSATITSLEIPEGQVMVAQDVAVKAHVNDQFGNPILNESVTFSAEPPEHMTISQNIVSTDTHGIAEVTMTPERNGSYMVKASLANGSSYEKDLVVIDQKLTLSASSPLIGVNSPTGATLTATLTSANGTPVEGQVINFSVTPEGATLSGGKVRTNSSGQAPVVLTSNKVGTYTVTASFHNGVTIQTQTIVKVTGNSSTAHVASFIADPSTIAATNSDLSTLKATVEDGSGNLIEGLTVYFALKSGSATLTSLTAVTDQNGIATTSVRGAITGSVTVSAVTTAGGMQTVDITLVAGPADASQSVLKNNRSSLKGDFTDSAELHLVLHDISGNPIKVSEGLEFVQSGTNAPYVQVSAIDYSKNFSGEYKATVTGGGEGIATLIPVLNGVHQAGLSTTIQFTRAEDKIMSGTVLVNGANLPTTTFPSQGFTGAYYQLNNDNFAPGKTAADYEFSSSASWVDVDATGKVTFKNVGSKWERITATPKTGGPSYIYEIRVKSWWVNAGDAFMIYSLAENFCSSNGYTLPLGDHLNHSRSRGIGSLYSEWGDMGHYTTEAGFHSNMYWSSSPANSNEQYVVSLATGDQSVFEKLGFAYATCYKNL

SEQ ID NO: 374 - protein, 732 aa, Escherichia coli
VGAGIERRAGIRMTEKVKQHAAPVTGSDEIDIGRLVGTVIEARWWVIGITAVFALCAVVYTFFATPIYSADALVQIEQSSGNSLVQDIGSALANKPPASDAEIQLIRSRLVLGKTVDDLDLDIAVSKNTFPIFGAGWDRLMGRQNETVKVTTFNRPKEMEDQVFTLNVLDNKNYTLSSDGGFSARGQAGQILKKEGVTLMVEAIHARPGSEFTVTKYSTLGMINQLQNSLTVTENGKDAGVLSLTYTGEDREQIRDILNSIARNYQEQNIERKSAEASKSLAFLAQQLPEVRSRLDVAENKLNAFRQDKDSVDLPLEAKAVLDSMVNIDAQLNELTFKEAEISKLYTKVHPAYRTLLEKRQALEDEKAKLNGRVTAMPKTQQEIVRLTRDVESGQQVYMQLLNKEQELKITEASTVGDVRIVDPAITQPGVLKPKKGLIILGAIILGLMLSIVGVLLRSLFNRGIESPQVLEEHGISVYASIPLSEWQKARDSVKTIKGIKRYKQSQLLAVGNPTDLAIEAIRSLRTSLHFAMMQAQNNVLMMTGVSPSIGKTFVCANLAAVISQTNKRVLLIDCDMRKGYTHELLGTNNVNGLSEILIGQGDITTAAKPTSIAKFDLIPRGQVPPNPSELLMSERFAELVNWASKNYDLVLIDTPPILAVTDAAIVGRHVGTTLMVARYAVNTLKEVETSLSRFEQNGIPVKGVILNSIFRRASAYQDYGYYEYEYKSDAK

SEQ ID NO: 375 - protein, 464 aa, Escherichia coli
VLLLDACSQMCPPFRRFPIVFHNSSIFLPYWLATLVSFRETFQEEKLLTMKGSYKSRWVIVIVVVIAAIAAFWFWQGRNDSQSAAPGATKQAQQSPAGGRRGMRSGPLAPVQAATAVEQAVPRYLTGLGTITAANTVTVRSRVDGQLMALHFQEGQQVKAGDLLAEIDPSQFKVALAQAQGQLAKDKATLTNARRDLARYQQLAKTNLVSRQELDAQQALVSETEGTIKADEASVASAQLQLDWSRITAPVDGRVGLKQVDVGNQISSGDTTGIVVITQTHPIDLLFTLPESDIATVVQAQKAGKPLVVEAWDRTNSKKLSEGTLLSLDNQIDATTGTIKVKARFNNQDDALFPNQFVNARMLVDTEQNAVVIPTAALQMGNEGHFVWVLNSENKVSKHLVTPGIQDSQKVVIRAGISAGDRVVTDGIDRLTEGAKVEVVEAQSATTPEEKATSREYAKKGARS

SEQ ID NO: 376 - protein, 765 aa, Escherichia coli
MKWLCSVGIAVSLALQPALADDLFGNHPLTPEARDAFVTELLKKMTVDEKIGQLRLISVGPDNPKEAIREMIKDGQVGAIFNTVTRQDIRAMQDQVMELSRLKIPLFFAYDVLHGQRTVFPISLGLASSFNLDAVKTVGRVSAYEAADDGLNMTWAPMVDVSRDPRWGRASEGFGEDTYLTSIMGKTMVEAMQGKSPADRYSVMTSVKHFAAYGAVEGGKEYNTVDMSPQRLFNDYMPPYKAGLDAGSGAVMVALNSLNGTPATSDSWLLKDVLRDQWGFKGITVSDHGAIKELIKHGTAADPEDAVRVALKSGINMSMSDEYYSKYLPGLIKSGKVTMAELDDAARHVLNVKYDMGLFNDPYSHLGPKESDPVDTNAESRLHRKEAREVARESLVLLKNRLETLPLKKSATIAVVGPLADSKRDVMGSWSAAGVADQSVTVLTGIKNAVGENGKVLYAKGANVTSDKGIIDFLNQYEEAVKVDPRSPQEMIDEAVQTAKQSDVVVAVVGEAQGMAHEASSRTDITILQSQRDLIAALKATGKPLVLVLMNGRPLALVKEDQQADAILETWFAGTEGGNAIADVLFGDYNPSGKLPMSFPRSVGQIPVYYSHLNTGRPYNADKPNKYTSRYFDEANGALYPFGYGLSYTTFTVSDVKLSAPTMKRDGKVTASVQVTNTGKREGATVVQMYLQDVTASMSRPVKQLKGFEKITLKPGETQTVSFPIDIEALKFWNQQMKYDAEPGKFNVFIGTDSARVKKGEFELL

SEQ ID NO: 377 - protein, 836 aa, Escherichia coli
LASTVEYGETVDGVVLEKDIQLVYGTANNTKINPGGEQHIKEFGISSNTEINGGYQYIEMNGTAEYSVLNDGYQIVQMGGAANQTTLNNGVLQVYGAANDPTIKGGRLIVEKDGITVLAAIEKGGLLEVKEGGLAIAVDQKAGGAIKASTRVMEVFGTNRLGQFEIKNGIANNMLLENGGSLRVEENDFAYNTTVDSGGLLEVMDGGTATGVDKKAGGKLIVSTNALEVSGTNSKGQFSIKDGVSKNYELDDGSGLIVMEDTQAIDTILDEHATMQSLGKDTGTRVQANAVYDLGRSDQNGSITYSSKAISENMVINNGRANVWAGTMVNVSVRGNDGILEVMKPQINYAPAMLVGKVVVSEGASLRTHGAVDTSKADVSLENSAWTIIADITTTNQNTRLNLANLAMSGANVIMMDESVTRSSVTASAENFTTLTTNTLSGNGNFYMRTDMANHQSDQLNVTGQATGDFKIFVTDTGASPAAGDSLTLVTTGGGDAAFTLGNAGGVVDIGTYEYTLLDNGNHSWSLAENRAQITPSTTDVLNMAAAQPLVFDAELDTVRERLGSVKGVSYDTAMWSSAINTRNNVTTDAGAGFEQTLTGLTLGIDSRFSREESSTIRGLFFGYSHSDIGFDRGGKGNVDSYTLGAYAGWEHQNGAYVDGVVKVDRFANTIHGKMSNGATAFGDYNSNGAGAHVESGFRWVDGLWSVRPYLAFTGFTTDGQDYTLSNGMRADVGNTRILRAEAGTAVSYHMDLQNGTTLEPWLKAAVRQEYADSNQVKVNDDGKFNNDVAGTRGVYQAGIRSSFTPTLSGHLSVSYGNGAGVESPWNTQAGVVWTF

SEQ ID NO: 378 - protein, 351 aa, Escherichia coli
MEISFTRVALLAAALFFVGCDQKPQPAKTHATEVTVLEGKTMGTFWRASIPGIDAKRSAELKEKIQTQLDADDQLLSTYKKDSALMRFNDSQSLSPWPVSEAMADIVTTSLRIGAKTDGAMDITVGPLVNLWGFGPEQQPVQIPSQEQIDAMKAKTGLQHLTVINQSHQQYLQKDLPDLYVDLSTVGEGYAADHLARLMEQEGISRYLVSVGGALNSRGMNGEGLPWRVAIQKPTDKENAVQAVVDINGHGISTSGSYRNYYELDGKRLSHVIDPQTGRPIEHNLVSVTVIAPTALEADAWDTGLMVLGPEKAKEVVRREGLAVYMITKEGDSFKTWMSPQFKSFLVSEKN

SEQ ID NO: 379 - protein, 1534 aa, Escherichia coli
MDTQRFQSQFHWHLSFKFSGAIAACLSLSLVGTGLANADDSLPSSNYAPPAGGTFFLLADSSFSSSEESKVRLEAPGRDYRRYQMEEYGGVDVRLYRIPDPMAFLRQQKNLHRIVVQPQYLGDGLNNTLTWLWDNWYGKSRRVMQRTFSSQSRQNVTQALPELQLGNAIIKPSRYVQNNQFSPLKKYPLVEQFRYPLWQAKPVEPQQGVKLEGASSNFISPQPGNIYIPLGQQEPGLYLVEAMVGGYRATTVVFVSDTVALSKVSGKELLVWTAGKKQGEAKPGSEILWTDGLGVMTRGVTDDSGTLQLQHISPERSYILGKDAEGGVFVSENFFYESEIYNTRLYIFTDRPLYRAGDRVDVKVMGREFHDPLHSSPIVSAPAKLSVLDANGSLLQTVDVTLDARNGGQGSFRLPENAVAGGYELRLAYRNQVYSSSFRVANYIKPHFEIGLALDKKEFKTGEAVSGKLQLLYPDGEPVKNARVQLSLRAQQLSMVGNDLRYAGRFPVSLEGSETVSDASGHVALNLPAADKPSRYLLTVSASDGAAYRVTTTKEILIERGLAHYSLSTAAQYSNSGESVVFRYAALESSKQVPVTYEWLRLEDRTSHSGDLPSGGKSFTVNFDKPGNYNLTLRDKDGLILAGLSHAVSGKGSMSHTGTVDIVADKTLYQPGETAKMLITFPEPIDEALLTLERDRVEQQSLLSHPANWLTLQRLNDTQYEARVPVSNSFAPNITFSVLYTRNGQYSFQNAGIKVAVPQLDIRVKTDKTHYQPGELVNVELTSSLKGKPVSAQLTVGVVDEMIYALQPEIAPNIGKFFYPLGRNNVRTSSSLSFISYDQALSSEPVAPGATNRSERRVKMLERPRREEVDTAAWMPSLTTDKQGKAYFTFLMPDSLTRWRITARGMNGDGLVGQGRAYLRSEKNLYMKWSMPTVYRVGDKPSAGLFIFSQQDNEPVALVTKFAGAEMRQTLTLHKGANYISLAQNIQQSGLLSAELQQNGQVQDSISTKLSFVDNSWPVEQQKNVMLGGGDNALMLPEQASNIRLQSSETPQEIFRNNLDALVDEPWGGVINTGSRLIPLSLAWRSLADHQSAAANDIRQMIQDNRLRLMQLAGPGARFTWWGEDGNGDAFLTAWAWYADWQASQALGVTQQPEYWQHMLDSYAEQADNMPLLHRALVLAWAQEMNLPCKTLLKGLDEAIARRGTKTEDFSEEDTRDINDSLILDTPESPLADAVANVLTMTLLKKAQLKSTVMPQVQQYAWDKAVNSNQPLAHTVVLLNSGGDATQAAAILSGLTAEQSTIERALAMNWLAKYMATMPSVVLPAPAGAWAKHKLTGGGEYWRWVGQGVPDILSFGDELSPQNVQVRWREAAKTAQQSNIPVTVERQLYRLIPGEEEMSFTLQPVTSNEIDSDALYLDEITLTSEQDAVLRYGQVEVPLPPGADVERTTWGISVNKPNAGKQQGQLLEKARNEMGELAYMVPVKELTGTVTFRHLLRFSQKGQFVLPPARYVRSYAPAQQSVAAGSEWTGMQVK

SEQ ID NO: 380 - protein, 875 aa, Escherichia coli
MSDLAREITPVNIEEELKSSYLDYAMSVIVGRALPDVRDGLKPVHRRVLYAMNVLGNDWNKAYKKSARVVGDVIGKYHPHGDSAVYDTIVRMAQPFSLRYMLVDGQGNFGSIDGDSAAAMRYTEIRLAKIAHELMADLEKETVDFVDNYDGTEKIPDVMPTKIPNLLVNGSSGIAVGMATNIPPHNLTEVINGCLAYIDDEDISIEGLMEHIPGPDFPTAAIINGRRGIEEAYRTGRGKVYIRARAEVEVDAKTGRETIIVHEIPYQVNKARLIEKIAELVKEKRVEGISALRDESDKDGMRIVIEVKRDAVGEVVLNNLYSQTQLQVSFGINMVALHHGQPKIMNLKDIIAAFVRHRREVVTRRTIFELRKARDRAHILEALAVALANIDPIIELIRHAPTPAEAKTALVANPWQLGNVAAMLERAGDDAARPEWLEPEFGVRDGLYYLTEQQAQAILDLRLQKLTGLEHEKLLDEYKELLDQIAELLRILGSADRLMEVIREELELVREQFGDKRRTEITANSADINLEDLITQEDVVVTLSHQGYVKYQPLSEYEAQRRGGKGKSAARIKEEDFIDRLLVANTHDHILCFSSRGRVYSMKVYQLPEATRGARGRPIVNLLPLEQDERITAILPVTEFEEGVKVFMATANGTVKKTVLTEFNRLRTAGKVAIKLVEGDELIGVDLTSGEDEVMLFSAEGKVVRFKESSVRAMGCNTTGVRGIRLGEGDKVVSLIVPRGDGAILTATQNGYGKRTAVAEYPTKSRATKGVISIKVTERNGLVVGAVQVDDCDQIMMITDAGTLVRTRVSEISIVGRNTQGVILIRTAEDENVVGLQRVAEPVDEEDLDTIDGSAAEGDDEIAPEVDVDDEPEEE

SEQ ID NO: 381 - protein, 542 aa, Escherichia coli
MKTRDSQSSDVIIIGGGATGAGIARDCALRGLRVILVERHDIATGATGRNHGLLHSGARYAVTDAESARECISENQILKRIARHCVEPTNGLFITLPEDDLSFQATFIRACEEAGISAEAIDPQQARIIEPAVNPALIGAVKVPDGTVDPFRLTAANMLDAKEHGAVILTAHEVTGLIREGATVCGVRVRNHLTGETQALHAPVVVNAAGIWGQHIAEYADLRIRMFPAKGSLLIMDHRINQHVINRCRKPSDADILVPGDTISLIGTTSLRIDYNEIDDNRVTAEEVDILLREGEKLAPVMAKTRILRAYSGVRPLVASDDDPSGRNVSRGIVLLDHAERDGLDGFITITGGKLMTYRLMAEWATDAVCRKLGNTRPCTTADLALPGSQEPAEVTLRKVISLPAPLRGSAVYRHGDRTPAWLSEGRLHRSLVCECEAVTAGEVQYAVENLNVNSLLDLRRRTRVGMGTCQGELCACRAAGLLQRFNVTTSAQSIEQLSTFLNERWKGVQPIAWGDALRESEFTRWVYQGLCGLEKEQKDAL

SEQ ID NO: 382 - protein, 400 aa, Escherichia coli
MLKVEMLSTGDEVLHGQIVDTNAAWLADFFFHQGLPLSRRNTVGDNLDDLVTILRERSQHADVLIVNGGLGPTSDDLSALAAATAKGEGLVLHEAWLKEMERYFHERGRVMAPSNRKQAELPASAEFINNPVGTACGFAVQLNRCLMFFTPGVPSEFKVMVEHEILPRLRERFSLPQPPVCLRLTTFGRSESDLAQSLDTLQLPPGVTMGYRSSMPIIELKLTGPASEQQAMEKLWLDVKRVAGQSVIFEGTEGLPAQISRELQNRQFSLTLSEQFTGGLLALQLSRAGAPLLACEVVPSQEETLAQTAHWITERRANHFAGLALAVSGFENEHLNFALATPDGTLALRVRFSTTRYSLAIRQEVCAMMALNMLRRWLNGQDIASEHGWIEVVESMTLSV

SEQ ID NO: 383 - protein, 331 aa, Escherichia coli
MIQPISGPPPGQPPGQGDNLPSGAGNQPLSSQQRTSLESLMTKVTSLTQQQRAELWAGIRHDIGLSGDSPLLSRHCPAAEHNLAQRLLAAQKSHSARQLLAQLGEYLRLGNNRQAVTDYIRHNFGQTPLNQLSPEQLKTILTLLQEGKMVIPQPQQREATDRPLLPAEHNALKQLVTKLAAATGEPSKQIWQSMLELSGVKDGELIPAKLFNHLVTWLQARQTLSQQNTPTLESLQMTLKQPLDASELAALSAYIQQKYGLSAQSSLSSAQAEDILNQLYQRRVKGIDPRDMQPLLNPFPPMMDTLQNMATRPALWILLVAIILMLVWLVR

SEQ ID NO: 384 - protein, 361 aa, Escherichia coli
MAGNTIGQLFRVTTFGESHGLALGCIVDGVPPGIPLTEADLQHDLDRRRPGTSRYTTQRREPDQVKILSGVFEGVTTGTSIGLLIENTDQRSQDYSAIKDVFRPGHADYTYEQKYGLRDYRGGGRSSARETAMRVAAGAIAKKYLAEKFGIEIRGCLTQMGDIPLEIKDWSQVEQNPFFCPDPDKIDALDELMRALKKEGDSIGAKVTVVASGVPAGLGEPVFDRLDADIAHALMSINAVKGVEIGDGFDVVALRGSQNRDEITKDGFQSNHAGGILGGISSGQQIIAHMALKPTSSITVPGRTINRFGEEVEMITKGRHDPCVGIRAVPIAEAMLAIVLMDHLLRQRAQNADVKTDIPRW

SEQ ID NO: 385 - protein, 879 aa, Escherichia coli
MPDHSLFRLRVLPCCVALAMSGSYVNAWAENEIQFDSRFLELKGDTKIDLKRFSSQGYVEPGKYNLQVQLNKQPLTEEYDIYWYASENDASKTYACLTPELVAQFGLKEDVAKNLQWIHDGKCLKPGQLEGIDIKADLSQSALVISLPQAYLEYTDINWDPPSRWDDGISGLIADYSITAQTRHEENGGDDSNEISGNGTVGVNLGAWRLRADWQTDYLHSKSNDDDVINGDDTQKNWEWSRYYAWRALPSLKAKLGLGEDYLNSDIFDGFNYVGGSISTDDQMLPPNLRGYAPDISGVAHTTAKVTVSQLGRVIYETQVPAGPFRIQDLGDSVSGTLHIRIEEQNGQVQEYDINTASMPFLTRPGQVRYKLMMGRPQEWGHHVEGGFFSGGEASWGIANGWSLYGGALADEHYQSAALGVGRDLSVFGAVAFDITHSHTRLDKETAYGKGSLDGNSFRLSYSKDFDELNSRVTFAGYRFSEENFMTMSEYLDASDSEMVRTGNDKEMYTATYNQNFRDAGVSVYLNYTRHTYWDRDEQTNYNVMLSHYFNLGSIRNMSISMTGYRYEYDNQADKGVYISLSMPWGDSSTISYNGNYGSGSDSSQVGYFSRVDDATHYQLNVGTSDNHSSVDGYYSHDGSLAQVDLSANYHEGQYTSAGISLQGGATLTAQGGALHRTQNMGGTRLLIDADGVAGVPVEGNGAAVYTNMFGKAVVADVNNYYRNQAYIDLNNLPENAEATQSVVQGTLTEGAIGYRKFSVISGQKAMAVLRLQDGSYPPFGAEVKNDSAQNVGLVDDDGNVYLAGVKPGEHMIVSWGGVAHCDIHLPDPLPADLFNGLLLPCQQTGAISPSMPHEIKPVIQEQTQQVMPTEAPVSVSAN

SEQ ID NO: 386 - protein, 436 aa, Escherichia coli
MGQVLPLVTRQGDRIAIVSGLRTPFARQATAFHGIPAVDLGKMVVGELLARSEIPAEVIEQLVFGQVVQMPEAPNIAREIVLGTGMNVHTDAYSVSRACATSFQAVANVVESLMAGTIRAGIAGGADSSSVLPIGVSKKLARVLVDVNKARTMSQRLKLFSRLRLRDLMPVPPAVAEYSTGLRMGDTAEQMAKTYGITREQQDALAHRSHQRAAQAWSDGKLKEEVMTAFIPPYKQLLAEDNNIRGNSSLADFAKLRPAFDRKHGTVTAANSTPLTDGAAAVILMTESRAKELGLVPLGYLRSYAFTAIDVWQDMLLGPAWSTPLALERAGLTMADLTLIDMHEAFAAQTLANIQLLGSERFAREALGRAHATGEVDDSKFNVLGGSIAYGHPFAATGARMITQTLHELRRRGGGFGLVTACAAGGLGAAMVLEAE

SEQ ID NO: 387 - protein, 345 aa, Escherichia coli
MDLSLLKALSEADAIASSEQEVRQILLEEADRLQKEVRFDGLGSVLIRLNESTGPKVMICAHMDEVGFMVRSISREGAIDVLPVGNVRMAARQLQPVRITTREECKIPGLLDGDRQGNDVSAMRVDIGARSYDEVMQAGIRPGDRVTFDTTFQVLPHQRVMGKAFDDRLGCYLLVTLLRELHSAELPAEVWLVASSSEEVGLRGGQTATRAVSPDVAIVLDTACWAKNFNYGAANHRQIGNGPMLVLSDKSLIAPPKLTAWIETVAAEIGVPLQADMFSNGGTDGGAVHLTGTGVPTVVMGPATRHGHCAASIADCRDILQMEQLLSALIQRLTRETVVQLTDFR

SEQ ID NO: 388 - protein, 361 aa, Escherichia coli
MTLLASLRDWLKAQQLDAVLLSSRQNKQPHLGISTGSGYVLISRESAHILVDSRYYADVEARTQGYQLHLLDATHTLTTIARQIIADEQLQTLGFEGQQVSWETAHRWQSELNAKLVSATPDVLRQIKTPEEVEKIRLACGIADRGAEHIRRFIQAGMSEREIAAELEWFMRQQGAEKTSFDTIVASGWRGALPHGKASDKIVAAGEFVTLDFGALYQGYCSDMTRTLLVNGEGVSAESHPLFNVYQIVLQAQLAAISAIRPGVRCQQVDEAARRVITEAGFSHYFGHNTAHAIGIEVHEDPRFSPRDTTTLQPGMLLTVEPGIYLPGQGGVRIEDVVLVTPQGAEVLYAMPKTVLLTGEA

SEQ ID NO: 389 - protein, 233 aa, Escherichia coli
VKKLITANDIREAHARGEQAMSVVLRASIITPEAREVADLLGFTITECDELIPVTASVPASVPADKTESQRIRETIIAQLPEGQFTESLVAQLMEKVMKEKQSLEQGAMQPSFKSVTGKGGIKVIDGSSVKFGRFDGAQPHCVGLTDLVTGDDGSSMAAGFMQWENAFFPWTLNYDEIDMVLEGELHVRHEGETMIAKAGDVMFIPKGSSIEFGTTSSVKFLYVAWPANWQSL

SEQ ID NO: 390 - protein, 659 aa, Escherichia coli
MNRFIMANSQQCLGCHACEIACVMAHNDEQHVLSQHHFHPRITVIKHQQQRSAVTCHHCEDAPCARSCPNGAISHVDDSIQVNQQKCIGCKSCVVACPFGTMQIVLTPVAAGKVKATAHKCDLCAGRENGPACVENCPADALQLVTDAALSGMAKSRRLRTARQEHQPWHASTAAQEMPVMSKVEQMQATPARGEPDKLAIEARKTGFDEIYLPFRADQAQREASRCLKCGEHSVCEWTCPLHNHIPQWIELVKAGNIDAAVELSHLTNTLPEITGRVCPQDRLCEGACTIRDEHGAVTIGNIERYISDQALAKGWRPDLSHVTKVDKRVAIIGAGPAGLACADVLIRNGVAVTVYDRHPEIGGLLTFGIPSFKLDKSLLARRREIFSAMGIHFELNCEVGKDVSLDSLLEQYDAVFVGVGTYRSMKAGLPNEDAPGVYDALPFLIANTKQVMGLEELPEEPFINTAGLNVVVLGGGDTAMDCVRTALRHGASNVTCAYRRDEANMPGSKKEVKNAREEGANFEFNVQPVALELNEQGHVCGIRFLRTRLGEPDAQGRRRPVPVEGSEFVMPADAVIMAFGFNPHGMPWLESHGVTVDKWGRIIADVESQYRYQTTNPKIFAGGDAVRGADLVVTAMAEGRHAAQGIIDWLGVKSVKSH

SEQ ID NO: 391 - protein, 337 aa, Escherichia coli
MNTEATHDQNEALTTGARLRNAREQLGLSQQAVAERLCLKVSTVRDIEEDKAPADLASTFLRGYIRSYARLVHIPEEELLPGLEKQAPLRAAKVAPMQSFSLGKRRKKRDGWLMTFTWLVLFVVIGLSGAWWWQDHKAQQEEITTMADQSSAELSSNSEQGQSVPLNTSTTTDPATTSTPPASVDTTATNTQTPVVTAPAPAVDPQQNAVVSPSQANVDTAATPAPTAATTPDGAAPLPTDQAGVTTPVADPNALVMNFTADCWLEVTDATGKKLFSGMQRKDGNLNLTGQAPYKLKIGAPAAVQIQYQGKPVDLSRFIRTNQVARLTLNAEQSPAQ

SEQ ID NO: 392 - protein, 1653 aa, Escherichia coli
MKKLRVAACMLMLALAGCDNNDNAPTAVKKDAPSEVTKAASSENASSAKLSAPERQKLAQQSAGKALTLLDLSEVQLDGAATLVLTFSIPLDPDQDFSRVIHVVDKKSGKVDGAWELSDNLKELRLRHLEPKRDLIVTIGKEVKALNNATFSKDYEKTITTRDIQPSVGFASRGSLLPGKVVEGLPVMALNVNNVDVNFFRVKPESLPAFISQWEYRNSLANWQSDKLLQMADLVYTGRFDLNPARNTREKLLLPLGDIKPLQQAGVYLAVMNQAGRYDYSNPATLFTLSDIGVSAHRYHNRLDIFTQSLENGAAQQGIEVSLLNEKGQTLTQATSDAQGHVQLENDKNAALLLARKDGQTTLLDLKLPALDLAEFNIAGAPGYSKQFFMFGPRDLYRPGETVILNGLLRDADGKALPNQPIKLDVIKPDGQVLRSVVSQPENGLYHFTWPLDSNAATGMWHIRANTGDNQYRMWDFHVEDFMPERMALNLTGEKTPLTPNDEVKFSVVGYYLYGAPANGNTLQGQLFLRPLREAVSALPGFEFGDIAAENLSRTLDEVQLTLDDKGRGEVSTESQWKETHSPLQVIFQGSLLESGGRPVTRRAEQAIWPADALPGIRPQFASKSVYDYRTDSTVKQPIVDEGSNAAFDIVYSDAQGVKKAVSGLQVRLIRERRDYYWNWSEDEGWQSQFDQKDLIENEQTLDLKADETGKVSFPVEWGAYRLEVKAPNEAVSSVRFWAGYSWQDNSDGSGAVRPDRVTLKLDKAGYRPGDTIKLHIAAPTAGKGYAMVESSEGPLWWQEIDVPAQGLDLTIPVDKTWNRHDLYLSTLVVRPGDKSRSATPKRAVGVLHLPLGDENRRLDLALETPAKMRPNQPLTVKIKASTKNGEKPKQVNVLVSAVDSGVLNITDYVTPDPWQAFFGQKRYGADIYDIYGQVIEGQGRLAALRFGGDGDELKRGGKPPVNHVNIVAQQALPVTLNEQGEGSVTLPIGDFNGELRVMAQAWTADEFGSNESKVIVAAPVIAELNMPRFMASGDNSRLTLDITNLTDKPQKLNVALTASGLLELVSDSPAAVELAPGVRTTLFIPVRALPGYGDGEIQATISGLALPGETVADQHKQWKIGVRPAFPAQTVNYGTALQPGETWAIPADGLQNFSPVTLEGQLLLSGKPPLNIARYIKELKAYPYGCLEQTASGLFPSLYTNAAQLQALGIKGDSDEKRRASVDIGISRLLQMQRDNGGFALWDKNGDEEYWLTAYVMDFLVRAGEQGYSVPTDAINRGNERLLRYLQDPGMMSIPYADNLKASKFAVQSYAALVLARQQKAPLGALREIWEHRADAASGLPLLQLGVALKTMGDATRDEEAIALALKTPRNSDERIWLGDYGSPLRDNALMLSLLEENKLLPDEQYSLLNTLSQQAFGERWLSTQESNALFLAARTIQDLPGKWQAQTSFSAEPLTGEKAQNSNLNSDQLATLQVTNSGEQPLWLRVDASGYPQSAPLPANNVLQIERHILGTDGKSKSLDSLRSGDLVLVWLQVKASNSVPDALVVDLLPAGLELENQNLANGSASLEQSGGEVQNLLNQMQQASIKHIEFRDDRFVAAVAVDEYQPVTLVYLARAVTPGTYQVPQPMVESMYVPQWRATGAAEDLLIVRP

SEQ ID NO: 393 - protein, 327 aa, Escherichia coli
MPKKMRTTRNLLLMATLLGSALFARAADKEMTIGAIYLDTQGYYAGVRQGVQDAAKDSSVQVQLIETNAQGDISKESTFVDTLVARNVDAIILSAVSENGSSRTVRRASEAGIPVICYNTCINQKGVDKYVSAYLVGDPLEFGKKLGNAAADYFIANKIDQPKIAVINCEAFEVCVQRRKGFEEVLKSRVPGAQIVANQEGTVLDKAISVGEKLIISTPDLNAIMGESGGATLGAVKAVRNQNQAGKIAVFGSDMTTEIAQELENNQVLKAVVDISGKKMGNAVFAQTLKVINKQADGEKVIQVPIDLYTKTEDGKQWLATHVDGLP

SEQ ID NO: 394 - protein, 1124 aa, Escherichia coli
LRDYSAKTLPDCSIHCHKSFNSVCLVNIEGTMTPVKVWQERVEIPTYETGPQDIHPMFLENRVYQGSSGAVYPYGVTDTLSEQKTLKSWQAVWLENDYIKVMILPELGGRVHRAWDKVKQRDFVYHNEVIKPALVGLLGPWISGGIEFNWPQHHRPTTFMPVDFTLEAHEDGAQTVWVGETEPMHGLQVMTGFTLRPDRAALEIASRVYNGNATPRHFLWWANPAVKGGEGHQSVFPPDVTAVFDHGKRAVSAFPIATGTYYKVDYSAGVDISRYKNVPVPTSYMAEKSQYDFVGAWCHDEDGGLLHVANHHIAPGKKQWSWGHSEFGQAWDKSLTDNNGPYIELMTGIFADNQPDFTRLDAYEEKRFEQFFLPYHSLGMVQNASRDAVIKLQRSERGIEWGLYAISPLNGYRLAIREIGKCDALLDDAVALTPATAIQGVLHGINPERLTIELSDADGNIVLSYQEHQPQELPLPDVAKAPLSAQDITSTDEAWFIGQHLEQYHHASRSPFDYYLRGVALDPLDYRCNLALAMLEYNRADFPQAVAYATQALKRAHALNKNPQCGQASLIRASAYERQGQYQQAEEDFWRAVWSGNSKAGGYYGLARLAARNGNFDAGLDFCQQSLRACPINQEVLCLHNLLLVLSGRQDNARLQREKLLRDYPLNATLWCLNWFDGRSESALAQWRGLCQGRDVNALMTAGQLINWGMPTLAAEMLNALDCQRTLPLYLQASLLPKAERGELVAKAIDVFPQFVRFPNTLEEVAALESIEECWFARHLLACFYYNKRSYNEAIALWQRCVEMSPEFADGWRGLAIHAWNKQHDYELAARYLDNAYQLAPQDARLLFERDLLDKLSGTTPEKRLARLENNLEIALKRDDMTAELLNLWHLTGQADKAADILATRKFHPWEGGEGKVTSQFILNQLLRAWQHLDAREPQQASELLHAALHYPENLSEGRLPGQTDNDIWFWQAICAKAQGDETEATRCLHLAATGDRTINIHSYYNDQPVDYLFWQGMALRLLGEQHTAQQLFSEMKQWAQEMAKTSIEADFFAVSQPDLLSLYGDLQQQHKEKCLMVAMLAAAGLGEIAQYESARAELTAINPAWPKAALFTTVMPFIFNYVH

SEQ ID NO: 395 - protein, 242 aa, Escherichia coli
MEGWQRAFVLHSRPWSETSLMLDVFTEESGRVRLVAKGARSKRSTLKGALQPFTPLLLRFGGRGEVKTLRSAEAVSLALPLSGITLYSGLYINELLSRVLEYETRFSELFFDYLHCIQSLAGVTGTPEPALRRFELALLGHLGYGVNFTHCAGSGEPVDDTMTYRYREEKGFIASVVIDNKTFTGRQLKALNAREFPDADTLRAAKRFTRMALKPYLGGKPLKSRELFRQFMPKRTVKTHYE

SEQ ID NO: 396 - protein, 1571 aa, Escherichia coli
VNTIHLRCLFRMNPLVWCLWADVAAKLRSLKRYSVFTFQRMKFMNRTSPYYCRRSVLSLLISALIYAPPGMAAFTPDVIGVVNDETVDGSQRVDERGTTNNTHIINHGQQNVYGGVSNGSLIESGGYQDVGRHNNYVGQSNNTTINGGRQSIHDGGISTGTIIESGNQDVYKGGISNGTTIKGGASRVEGGSANGTLIDGGSQIVKVQGHADGTTINKSGSQDVVQGSLATNTTINGGRQYVEQSTVETTTIKNGGEQRVYESRALDTTIEGGTQSLNSKSTAKNTQIYSGGTQIIDNTSSSDVIEVYSGGVLDVSGGTATNVTQHDGAILKTNTNGTTVSGTNSEGAFSIHNHVADNVLLENGGHLDINAYGSANKTIIKDKGTMSVLTNAKADATRIDNGGVMDVAGNATNTIINGGTQNINNYGIATGTNINSGTQNIKSGGKADTTIISSGSRQVVEKDGTAIGSNISAGGSLIVYTGGIAHGVNQETGSALVANTGAGTDIEGYNKLSHFTITGGEANYVVLENTGELTVVAKTSAKNTTIDAGGKLIVQKEAKTDSTRLNNGGVLEVQDGGEAKHVEQQSGGALIASTTSGTLIEGTNSYGDAFYIRNSEAKNVVLENAGSLTVVTGSRAVDTIINANGKMDVYGKDVGTVLNSAGTQTIYASATSDKANIKGGKQTVYGLATEANIESGEQIVDGGSTEKTHINGGTQTVQNYGKAINTDIVSGLQQIMANGTAEGSIINGGSQIVNEGGLAENSVLNDGGTLDVREKGSATGIQQSSQGALVATTRATRVTGTRADGVAFSIEQGAANNILLANGGVLTVESDTSSDKTQVNTGGREIVKTKATATGTTLTGGEQIVEGVANETTINDGGIQTVSANGEAIKTTINEGGTLTVNDNGKATDIVQNSGAALQTSTANGIEISGTHQYGTFSISGNLATNMLLENGGNLLVLAGTEARDSTVGKGGAMQNQGQDSATKVNSGGQYTLGRSKDEFQALARAEDLQVAGGTAIVYAGTLADASVSGATGSLSLMTPRDNVTPVKLEGAIRITDSATLTIGNGVDTTLADLTAASRGSVWLNSNNSCAGTSNCEYRVNSLLLNDGNVYLSAQTAAPATTNGIYNTLTTNELSGSGNFYLHTNVAGSRGDQLVVNNNATGNFKIFVQDTGVSPQSDDAMTLVKTGGGDASFSLGNTGGFVDLGTYEYVLKSDGNSNWNLTNDVKPNPDPNPNPNPNPKPDPKPDPKPDPKPDPTPEPTPTPVPEKRITPSTAAVLNMAATLPLVFDAELNSIRERLNIMKASPHNNNVWGATYNTRNNVTTDAGAGFEQTLTGMTVGIDSPNDIPEGIATLGAFMGYSHSHIGFDRGGHGSVGSYSLGGYASWEHESGFYLDGVVKLNRFESNVAGKMSSGGAANGSYHSNGLGGHIETGMRFTDGNWNLTPYASLTGFTADNPEYHLSNGMESKSVDTRSIYRELGATLSYNMRLGNGMEIEPWLKAAVRKEFVDDNRVKVNNDGNFVNDLSGRRGIYQAGIKASFSSTLSGHLGVGYSHGAGVESPWNAVAGVNWSF

SEQ ID NO: 397 - protein, 208 aa, Escherichia coli
MVSRRVQALLDQLRAQGIQDEQVLNALAAVPREKFVDEAFEQKAWDNIALPIGQGQTISQPYMVARMTELLELTPQSRVLEIGTGSGYQTAILAHLVQHVCSVERIKGLQWQARRRLKNLDLHNVSTRHGDGWQGWQARAPFDAIIVTAAPPEIPTALMTQLDEGGILVLPVGEEHQYLKRVRRRGGEFIIDTVEAVRFVPLVKGELA

SEQ ID NO: 398 - protein, 352 aa, Escherichia coli
MLCIFDSNSPVMADVQEEGKPQLWNHKQNDALGLYLDLLIQAINTGTINAEDWQKGDRLKSVALLIAYLDKANFYVMEDSGAWEEDARLNTSSVALVTSGLERLSNLLSKKDSVFVSDLLREAKVNELDETLSTTRLNHLIDKGYERITLQLDLGGESPGYLEKDKHYREADAALLNVIYPANLSKINTRRKEQVLKIVKKLAGPYGIKRYEKDNYQSANFWFNDIKTDTDQNSHAKREKSFIPSTEAEWFFDSWYAKSAAIVYKESRKEEYLNDSVQFMNRSLAQITGENMIGANGRSVPEMALPESYNYIHKSGTLHEAPSPIIPLNWSKASMTLMLKEMSNLINDEGIK

SEQ ID NO: 399 - protein, 403 aa, Escherichia coli
MAKNIPFKLILEKAKDYQADMTRFLRDMVAIPSESCDEKRVVHRIKEEMEKVGFDKVEIDPMGNVLGYIGHGPRLVAMDAHIDTVGIGNIKNWDFDPYEGMETDELIGGRGTSDQEGGMASMVYAGKIIKDLGLEDEYTLLVTGTVQEEDCDGLCWQYIIEQSGIRPEFVVSTEPTDCQVYRGQRGRMEIRIDVQGVSCHGSAPERGDNAIFKMGPILGELQELSQRLGYDEFLGKGTLTVSEIFFTSPSRCAVADSCAVSIDRRLTWGETWEGALDEIRALPAVQKANAVVSMYNYDRPSWTGLVYPTECYFPTWKVEEDHFTVKALVNAYEGLFGKAPVVDKWTFSTNGVSIMGRHGIPVIGFGPGKEPEAHAPNEKTWKSHLVTCAAMYAAIPLSWLATE

SEQ ID NO: 400 - protein, 294 aa, Escherichia coli
MLACCAIYSPVRCAFPYTETERRFTCKRRIFRIILTLCGRKNMKIRALLVAMSVATVLTGCQNMDSNGLLSSGAEAFQAYSLSDAQVKTLSDQACQEMDSKATIAPANSEYAKRLTTIANALGNNINGQPVNYKVYMAKDVNAFAMANGCIRVYSGLMDMMTDNEVEAVIGHEMGHVALGHVKKGMQVALGTNAVRVAAASAGGIVGSLSQSQLGDLGEKLVNSQFSQRQEAEADDYSYDLLRQRGISPAGLATSFEKLAKLEEGRQSSMFDDHPASAERAQHIRDRMSADGIK

SEQ ID NO: 401 - protein, 235 aa, Escherichia coli
MYRYLSIAAVVLSAAFSGPALAEGINSFSQAKAAAVKVHADAPGTFYCGCKINWQGKKGVVDLQSCGYQVRKNENRASRVEWEHVVPAWQFGHQRQCWQDGGRKNCAKDPVYRKMESDMHNLQPSVGEVNGDRGNFMYSQWNGGEGQYGQCAMKVDFKEKAAEPPARARGAIARTYFYMRDHYNLTLSRQQTQLFNAWDKMYPVTDWECERDERIAKVQGNHNPYVQRACQARKS

SEQ ID NO: 402 - protein, 211 aa, Escherichia coli
VTAPFFPRILGAVAFLNQETEPLTMNLQHHFLIAMPALQDPIFRRSVVYICEHNTNGAMGIIVNKPLENLKIEGILEKLKITPEPRDESIRLDKPVMLGGPLAEDRGFILHTPPSNFASSIRISDNTVMTTSRDVLETLGTDKQPSDVLVALGYASWEKGQLEQEILDNAWLTAPADLNILFKTPIADRWREAAKLIGVDILTMPGVAGHA

SEQ ID NO: 403 - protein, 341 aa, Escherichia coli
VPGYAQYRSFSEDLSMNMEEIVALSVKHNVSDLHLCSAWPARWRIRGLMEAAPFDAPDVEELLREWLDDDQRAILLENGQLDFAVSLTENQRLRGSAFAQRHGISLALRLLPSHCPQLEQLGTPPILPELLKSENGLILVTGATGSGKSTTLAAMVGYLNQHADAHILTLEDPVEYLYASQRCLIQQREIGLHCMTFASGLRAALREDPDVILLGELRDSETIRLALTAAETGHLVLATLHTRGAAQAVERLVDSFPAQEKDPVRNQLAGSLRAVLSQKLEVDKQEGRVALFELLINTPAVGNLIREGKTHQLPHVIQTGQQVGMITFQQSYQQRVGEGRL

SEQ ID NO: 404 - protein, 335 aa, Escherichia coli
VKKQWIVGTALLMLMTGNVWADGEPPTENILKDQFKKQYHGILKLDAITLKNLDAKGNQATWSAEGDVSSSDDLYTWVGQLADYELLEQTWTKDKPVKFSAMLTSKGTPASGWTVNFYSFQATASDRGRVVDDIKTNNKYLIVNSEDFNYRFSQLETALNTQKNSIPALEKEVKALDKQMVAAQKAADAYWGKDANGKQMTREDAFKKIHQQRDEFNKQNDSEAFAVKYDKEVYQPAIAACHKQSEECYEVPIQQKRDFDINEQRRQTFLQSQKLSRKLQDDWITLEKGQYPLTMKVSEINSKKVAILMKIDDINQANERWKKDTEQLRRNGVIK

SEQ ID NO: 405 - protein, 239 aa, Escherichia coli
MKNDVISPEFDENGRPLRRIRSFVRRQGRLTKGQEHALENYWPVMGVEFSEDMLDFPALFGREAPVTLEIGFGMGASLVAMAKDRPEQDFLGIEVHSPGVGACLASAHEEGLSNLRVMCHDAVEVLHKMIPDNSLRMVQLFFPDPWHKARHNKRRIVQVPFAELVKSKLQLGGVFHMATDWEPYAEHMIEVMSSIDGYKNLSESNDYVPRPASRPVTKFEQRGHRLGHGVWDLMFERVK

SEQ ID NO: 406 - protein, 421 aa, Escherichia coli
MALTDAKIRAAKPTDKAYKLTDGAGMFLLVHPNGSRYWRLRYRILGKEKTLALVVYPEVSLSEARTKRDEARKLISEGVDPCEQKRAKKVVPDLQLSFEHIARRWHASNKQWAQSHSDKVLKSLETHVFPFIGNRDITTLNTPDLLIPVRAAEAKQIYEIASRLQQRISAVMRYAVQSGIIRYNPALDMAGALTTVKRQHRPALDLSRLPELLSRIGSYKGQPVTQLAVMLNLLVFIRSSELRYARWSEIDIDNAMWTIPAEREPLPGVKFSHRGSKMRTPHLVPLSKQVVAILAELQTWAGENGLIFTGAHDPRKPISENTVNKALRVMGYDTTQDVCGHGFRAMACSALIESGLWSRDAVERQMSHQERNGVRAAYIHKAEHLEERRLMLQWWADFLDANRERFISPFEYAKINNPLKQ

SEQ ID NO: 407 - protein, 495 aa, Escherichia coli
MQMKKLLPILIGLSLSGFSSLSQAENLMQVYQQARLSNPELRKSAADRDAAFEKINEARSPLLPQLGLGADYTYSNGYRDANGINSNATSASLQLTQSIFDMSKWRALTLQEKAAGIQDVTYQTDQQTLILNTATAYFNVLNAIDVLSYTQAQKEAIYRQLDQTTQRFNVGLVAITDVQNARAQYDTVLANEVTARNNLDNAVEQLRQITGNYYPELAALNVENFKTDKPQPVNALLKEAEKRNLSLLQARLSQDLAREQIRQAQDGHLPTLDLTASSGISDTSYSGSKTRGAAGTQYDDSNMGQNKVGLSFSLPIYQGGMVNSQVKQAQYNFVGASEQLESAHRSVVQTVRSSFNNINASISSINAYKQAVVSAQSSLDAMEAGYSVGTRTIVDVLDATTTLYNAKQELANARYNYLINQLNIKSALGTLNEQDLLALNNALSKPVSTNPENVAPQTPEQNAIADGYAPDSPAPVVQQTSARTTTSNGHNPFRN

SEQ ID NO: 408 - protein, 433 aa, Escherichia coli
MAQEIELKFIVNHSAVEALRDHLNTLGGEHHDPVQLLNIYYETPDNWLRGHDMGLRIRGENGRYEMTMKVAGRVTGGLHQRPEYNVALSEPTLDLAQLPTEVWPNGELPADLASRVQPLFSTDFYREKWLVAVDGSRIEIALDQGEVKAGEFAEPICELELELLSGDTRAVLKLANQLVSQTGLRQGSLSKAARGYHLAQGNPAREIKPTTILHVAAKADVEQGLEAALELALAQWQYHEELWVRGNDAAKEQVLAAISLVRHTLMLFGGIVPRKASTHLRDLLTQCEATIASAVSAVTAVYSTETAMAKLALTEWLVSKAWQPFLDAKAQGKISDSFKRFADIHLSRHAAELKSVFCQPLGDRYRDQLPRLTRDIDSILLLAGYYDPVVAQAWLENWQGLHHAIATGQRIEIEHFRNEANNQEPFWLHSGKR

SEQ ID NO: 409 - protein, 168 aa, Escherichia coli
MVEDILAPGLRVVFCGINPGLSSAGTGFPFAHPANRFWKVIYQAGFTDHQLKPQEAQHLLDYRCGVTKLVDRPTVQANEISKQELHAGGRKLIEKIEDYQPQALAILGKQAYEQGFSQRGAQWGKQTLSIGSTQIWVLPNPSGLSRVSLEKLVEAYRELDQALVVRGR

SEQ ID NO: 410 - protein, 167 aa, Escherichia coli
MLIRVEIPIDAPGIDALLRRSFESDAEAKLVHDLREDGFLTLGLVATDDEGQVIGYVAFSPVDVQGEDLQWVGMAPLAVDEKYRGQGLARQLVYEGLDSLNEFGYAAVVTLGDPALYSRFGFELAAHHDLRCRWPGTESAFQVHRLADDALNGVTGLVEYHEHFNRF

SEQ ID NO: 411 - protein, 335 aa, Escherichia coli
MTDKTIAFSLLDLAPIPEGSSARDAFSHSLDLARLAEKRGYHRYWLAEHHNMTGIASAATSVLIGYLAANTTTLHLGSGGVMLPNHSPLVIAEQFGTLNTLYPGRIDLGLGRAPGSDQRTMMALRRHMSGDIDNFPRDVAELVAWFDARDPNPHVRPVPGYGEQIPVWLLGSSLYSAQLAAQLGLPFAFASHFAPDMLFQALHLYRSNFKPSARLEKPYAMVCINIIAADSNRDAEFLFTSMQQAFVKLRRGETGQLPPPIQNMDQFWSPSEQYGVQQALSMSLVGDKAKARHGLQSILRETDADEIMVNGQIFDHQARLHSFELAMDVKEELLG

SEQ ID NO: 412 - protein, 890 aa, Escherichia coli
MTDVTIKTLAAERQTSVERLVQQFADAGIRKSADDSVSAQEKQTLIDHLNQKNSGPDKLTLQRKTRSTLNIPGTGGKSKSVQIEVRKKRTFVKRDPQEAERLAAEEQAQREAEEQARREAEESAKREAQQKAEREAAEQAKREAAEQAKREAAEKDKVSNQQDDMTKNAQAEKARREQEAAELKRKAEEEARRKLEEEARRVAEEARRMAEENKWTDNAEPTEDSSDYHVTTSQHARQAEDESDREVEGGRGRGRNAKAARPKKGNKHAESKADREEARAAVRGGKGGKRKGSSLQQGFQKPAQAVNRDVVIGETITVGELANKMAVKGSQVIKAMMKLGAMATINQVIDQETAQLVAEEMGHKVILRRENELEEAVMSDRDTGAAAEPRAPVVTIMGHVDHGKTSLLDYIRSTKVASGEAGGITQHIGAYHVETENGMITFLDTPGHAAFTSMRARGAQATDIVVLVVAADDGVMPQTIEAIQHAKAAQVPVVVAVNKIDKPEADPDRVKNELSQYGILPEEWGGESQFVHVSAKAGTGIDELLDAILLQAEVLELKAVRKGMASGAVIESFLDKGRGPVATVLVREGTLHKGDIVLCGFEYGRVRAMRNELGQEVLEAGPSIPVEILGLSGVPAAGDEVTVVRDEKKAREVALYRQGKFREVKLARQQKSKLENMFANMTEGEVHEVNIVLKADVQGSVEAISDSLLKLSTDEVKVKIIGSGVGGITETDATLAAASNAILVGFNVRADASARKVIEAESLDLRYYSVIYNLIDEVKAAMSGMLSPELKQQIIGLAEVRDVFKSPKFGAIAGCMVTEGVVKRHNPIRVLRDNVVIYEGELESLRRFKDDVNEVRNGMECGIGVKNYNDVRTGDVIEVFEIIEIQRTIA

SEQ ID NO: 413 - protein, 152 aa, Escherichia coli
VGLSTLEQKLTEMITAPVEALGFELVGIEFIRGRTSTLRIYIDSEDGINVDDCADVSHQVSAVLDVEDPITVAYNLEVSSPGLDRPLFTAEHYARFVGEEVTLVLRMAVQNRRKWQGVIKAVDGEMITVTVEGKDEVFALSNIQKANLVPHF

SEQ ID NO: 414 - protein, 477 aa, Escherichia coli
MRFSRFIIGLTSCIAFSVQAANVDEYITQLPAGANLALMVQKVGASAPAIDYHSQQMALPASTQKVITALAALIQLGPDFRFTTTLETKGNVENGVLKGDLVARFGADPTLKRQDIRNMVATLKKSGVNQIDGNVLIDTSIFASHDKAPGWPWNDMTQCFSAPPAVAIVDRNCFSVSLYSAPKPGDMAFIRVASYYPVTMFSQVRTLPRGSAEAQYCELDVVPGDLNRFTLTGCLPQRSEPLPLAFAVQDGASYAGAILKDELKQAGITWSGTLLRQTQVNEPGTVVASKQSAPLHDLLKIMLKKSDNMIADTVFRMIGHARFNVPGTWRAGSDAVRQILRQQAGVDIGNTIIADGSGLSRHNLIAPATMMQVLQYIAQHDNELNFISMLPLAGYDGSLQYRAGLHQAGVDGKVSAKTGSLQGVYNLAGFITTASGQRMAFVQYLSGYAVEPADQRNRRIPLVRFESRLYKDIYQNN

SEQ ID NO: 415 - protein, 185 aa, Escherichia coli
MKFKTNKLSLNLVLASSLLAASIPAFAVTGDTDQPIHIESDQQSLDMQGNVVTFTGNVIVTQGTIKINADKVVVTRPGGEQGKEVIDGYGKPATFYQMQDNGKPVEGHASQMHYELAKDFVVLTGNAYLQQVDSNIKGDKITYLVKEQKMQAFSDKGKRVTTVLVPSQLQDKNNKGQTPAQKKGN

SEQ ID NO: 416 - protein, 284 aa, Escherichia coli
MVLMIVSGRSGSGKSVALRALEDMGFYCVDNLPVVLLPDLARTLADREISAAVSIDVRNMPESPEIFEQAMSNLPDAFSPQLLFLDADRNTLIRRYSDTRRLHPLSSKNLSLESAIDKESDLLEPLRSRADLIVDTSEMSVHELAEMLRTRLLGKRERELTMVFESFGFKHGIPIDADYVFDVRFLPNPHWDPKLRPMTGLDKPVAAFLDRHTEVHNFIYQTRSYLELWLPMLETNNRSYLTVAIGCTGGKHRSVYIAEQLADYFRSRGKNVQSRHRTLEKRKP

SEQ ID NO: 417 - protein, 1517 aa, Escherichia coli
MTRKPRRHALSVPVRSGSEVGFPQSLGEVHDMLYDKSLERDNCGFGLIAHIEGEPSHKVVRTAIHALARMQHRGAILADGKTGDGCGLLLQKPDRFFRIVAQERGWRLAKNYAVGMLFLNKDPELAAAARRIVEEELQRETLSIVGWRDVPTNEGVLGEIALSSLPRIEQIFVNAPAGWRPRDMERRLFIARRRIEKRLEADKDFYVCSLSNLVNIYKGLCMPADLPRFYLDLADLRLESAICLFHQRFSTNTVPRWPLAQPFRYLAHNGEINTITGNRQWARARTYKFQTPLIPDLHDAAPFVNEIGSDSSSMDNMLELLLAGGMDIIRAMRLLVPPAWQNNPDMDPELRAFFDFNSMHMEPWDGPAGIVMSDGRFAACNLDRNGLRPARYVITKDKLITCASEVGIWDYQPDEVVEKGRVGPGELMVIDTRSGRILHSAETDDDLKSRHPYKEWMEKNVRRLVPFEDLPDEEVGSRELDDDTLASYQKQFNYSAEELDSVIRVLGENGQEAVGSMGDDTPFAVLSSQPRIIYDYFRQQFAQVTNPPIDPLREAHVMSLATSIGREMNVFCEAEGQAHRLSFKSPILLYSDFKQLTTMKEEHYRADTLDITFDVTKTTLEATVKELCDKAEKMVRSGTVLLVLSDRNIAKDRLPVPAPMAVGAIQTRLVDQSLRCDANIIVETASARDPHHFAVLLGFGATAIYPYLAYETLGRLVDTHAIAKDYRTVMLNYRNGINKGLYKIMSKMGISTIASYRCSKLFEAVGLHNDVVGLCFQGAVSRIGGASFEDFQQDLLNLSKRAWLARKPISQGGLLKYVHGGEYHAYNPDVVRTLQQAVQSGEYSDYQEYAKLVNERPATTLRDLLAITPGENAVNIADVEPASELFKRFDTAAMSIGALSPEAHEALAEAMNSIGGNSNSGEGGEDPARYGTNKVSRIKQVASGRFGVTPAYLVNADVIQIKVAQGAKPGEGGQLPGDKVTPYIAKLRYSVPGVTLISPPPHHDIYSIEDLAQLIFDLKQVNPKAMISVKLVSEPGVGTIATGVAKAYADLITIAGYDGGTGASPLSSVKYAGCPWELGLVETQQALVANGLRHKIRLQVDGGLKTGVDIIKAAILGAESFGFGTGPMVALGCKYLRICHLNNCATGVATQDDKLRKNHYHGLPFKVTNYFEFIARETRELMAQLGVTRLVDLIGRTDLLKELDSFTAKQQKLALSKLLETAEPHPGKALYCTETNPPFDNGLLNAQLLQQAKPFVDERQSKTFWFDIRNTDRSVGASLSGYIAQTHGDQGLAADPIKAYFNGTAGQSFGVWNAGGVELYLTGDANDYVGKGMAGGLIAIRPPVGSAFRSHEASIIGNTCLYGATGGRLYAAGRAGERFGVRNSGAITVVEGIGDNGCEYMTGGIVCILGKTGVNFGAGMTGGFAYVLDESGDFRKRVNPELVEVLSVDDLAIHEEHLRGLITEHVQHTGSQRGEEILANWSTFATKFALVKPKSSDVKALLGHRSRSAAELRVQAQ

SEQ ID NO: 418 - protein, 272 aa, Escherichia coli
METYAVFGNPIAHSKSPFIHQQFAQQLNIEHPYGRVLAPINDFVNTLNAFFSAGGKGANVTVPFKEEAFARADELTERAALAGAVNTLKRLEDGRLLGDNTDGVGLLSDLERLSFIRPGLRILLIGAGGASRGVLLPLLSLDCAVTITNRTVSRAEELAKLFAHTGSIQALGMDELEGHEFDLIINATSSGISGDIPAIPSSLIHPGIYCYDMFYQKGKTPFLAWCEQRGSKPTADGLGMLVAQAAHAFLLWHGVLPDVEPVIKQLQEELSA

SEQ ID NO: 419 - protein, 104 aa, Escherichia coli [sequence omitted]

SEQ ID NO: 420 - protein, 270 aa, Escherichia coli
MKSLFKVTLLATTMAVALHAPITFAAEAAKPATTADSKAAFKNDDQKSAYALGASLGRYMENSLKEQEKLGIKLDKDQLIAGVQDAFADKSKLSDQEIEQTLQAFEARVKSSAQAKMEKDAADNEAKGKEYREKFAKEKGVKTSSTGLVYQVVEAGKGEAPKDSDTVVVNYKGTLIDGKEFDNSYTRGEPLSFRLDGVIPGWTEGLKNIKKGGKIKLVIPPELAYGKAGVPGIPPNSTLVFDVELLDVKPAPKADAKPEADAKAADSAKK

SEQ ID NO: 421 - protein, 847 aa, Escherichia coli
MSKVRLAIIGNGMVGHRFIEDLRDKSDAANFDITVFCEEPRIAYDRVHLSSYFSHHTAEELSLVREGFYEKHGIKVLVGERAITINRQEKVIHSSAGRTVFYDKLIMATGSYPWIPPIKGSDTQDCFVYRTIEDLNAIESCARRSKRGAVVGGGLLGLEAAGALKNLGIETHVIEFAPMLMAEQLDQMGGEQLRRKIESMGVRVHTSKNTLEIVQEGVEARKTMRFADGSELEVDFIVFSTGIRPRDKLATQCGLDVAPRGGIVINDSCQTSDPDIYAIGECASWNNRVFGLVAPGYKMAQVAVDHILGSENAFEGADLSAKLKLLGVDVGGIGDAHGRTPGARSYVYLDESKEIYKRLIVSEDNKTLLGAVLVGDTSDYGNLLQLVLNAIELPENPDSLILPAHSGSGKPSIGVDKLPDSAQICSCFDVTKGDLIAAINKGCHTVAALKAETKAGTGCGGCIPLVTQVLNAELAKQGIEVNNNLCEHFAYSRQELFHLIRVEGIKTFEELLAKHGKGYGCEVCKPTVGSLLASCWNEYILKPEHTPLQDSNDNFLANIQKDGTYSVIPRSPGGEITPEGLMAVGRIAREFNLYTKITGSQRLAMFGAQKDDLPEIWRQLIEAGFETGHAYAKALRMAKTCVGSTWCRYGVGDSVGLGVELENRYKGIRTPHKMKFGVSGCTRECSEAQGKDVGIIATEKGWNLYVCGNGGMKPRHADLLAADIDRETLIKYLDRFMMFYIRTADKLTRTAPWLENLEGGIDYLKAVIIDDKLGLNAHLEEEMARLREAVVCEWTETVNTPSAQTRFKHFINSDKRDPNVQMVPEREQHRPATPYERIPVTLVEDNA

SEQ ID NO: 422 - protein, 412 aa, Escherichia coli
MKQWIAALLLMLIPGVQAAKPQKVTLMVDDVPVAQVLQALAEQEKLNLVVSPDVSGTVSLHLTDVPWKQALQTVVKSAGLITRQEGNILSVHSIAWQNDNIARQEAEQARAQANLPLENRNITLQYADAGELAKAGEKLLSAKGSMTVDKRTNRLLLRDNKTALSALEQWVAQMDLPVGQVELSAHIVTINEKSLRELGVKWTLADAQHAGGVGQVTTLGSDLSVATATTHVGFNIGRINGRLLDLELSALEQKQQLDIIASPRLLASHLQPASIKQGSEIPYQVSSGESGATSVEFKEAVLGMEVTPTVLQKGRIRLKLHISQNVPGQVLQQADGEVLAIDKQEIETQVEVKSGETLALGGIFTRKNKSGQDSVPLLGDIPWFGQLFRHDGKEDERRELVVFITPRLVSSE

SEQ ID NO: 423 - protein, 740 aa, Escherichia coli
VPFIARYRKEITGGLDDTQLRNLETRLGYLRELEERRQAILKSISEQGKLTDDLANAINATLSKTELEDLYLPYKPKRRTRGQIAIEAGLEPLADLLWSDPSHTPEVAAAQYIDADKGVADTKAALDGARYILMERFAEDAALLAKVRDYLWKNAHLVSTVVSGKEEEGAKFRDYFDHHEPLSTVPSHRALAMFRGRNEGVLQLSLNADPQFDEPPKESYCEQIIMDHLGLRLNNAPADSWRKGVVSWTWRIKVLMHLETELMGTVRERAENEAINVFARNLHDLLMAAPAGLRATMGLDPGLRTGVKVAVVDATGKLVATDTIYPHTGQAAKAAMTVAALCEKHNVELVAIGNGTASRETERFYLDVQKQFPKVTAQKVIVSEAGASVYSASELAAQEFPDLDVSLRGAVSIARRLQDPLAELVKIDPKSIGVGQYQHDVSQTQLARKLDAVVEDCVNAVGVDLNTASVPLLTRVAGLTRMMAQNIVAWRDENGQFQNRQQLLKVSRLGPKAFEQCAGFLRINHGDNPLDASTVHPEAYPVVERILAATQQALKDLMGNSSELRNLKASDFTDEKFGVPTVTDIIKELEKPGRDPRPEFKTAQFADGVETMNDLQPGMILEGAVTNVTNFGAFVDIGVHQDGLVHISSLSNKFVEDPHTVVKAGDIVKVKVLEVDLQRKRIALTMRLDEQPGETNSRRGGGNDRPQNNRPAAKPRGREAQPAGNSAMMDALAAAMGKKR

SEQ ID NO: 424 - protein, 694 aa, Escherichia coli
MESKRLDNAALAAGISPHYINAHGKPQSISAETKRRLLDAMHQRTATKVAVTPVPNVMVYTSGKKMPMVVEGSGEYSWLLTTEEGTQYKGHITGGKAFNLPTKLPEGYHTLTLTQEDQRGHCRVIVAPKRCYEPQALLNKQKLWGACVQLYTLRSEKNWGIGDFGDLKAMLVDVAKRGGSFIGLNPIHALYPANPESASPYSPSSRRWLNVIYIDVNAVEDFHLSEEAQAWWQLPTTQQTLQQARDADWVDYSTVTALKMTALRMAWKGFAQRDDEQMAAFRQFVADQGDSLFWQAAFDALHAQQVKEDEMRWGWPAWPEMYQNVDSPEVRQFCEEHRDDVDFYLWLQWQAYSQFAACWEISQGYEMPIGLYRDLAVGVAEGGAETWCDRELYCLKASVGAPPDILGPLGQNWGLPPMDPHIITARAYEPFIELLRANMQNCGALRIDHVMSMLRLWWIPYGETADQGAYVHYPVDDLLSILALESKRHRCMVIGEDLGTVPVEIVGKLRSSGVYSYKVLYFENDHEKTFRAPKAYPEQSMAVAATHDLPTLRGYWESGDLTLGKTLGLYPDEVVLRGLYQDRELAKQGLLDALHKYGCLPKRAGHKASLMSMTPTLNRGLQRYIADSNSALLGLQPEDWLDMAEPVNIPGTSYQYKNWRRKLSATLETMFADDGVNKLLKDLDRRRRAAAKKK

SEQ ID NO: 425 - protein, 194 aa, Escherichia coli
MIKSTFWRAFALTATLILTGCSHSQPEQEGRPQAWLQPGTRITLPAPGISPAVNSQQLLTGSFNGKTQSLLVMLNADDQKITLAGLSSVGIRLFLVTYDAQGLRAEQSIVVPQLPPASQVLADVMLSHWPISAWQPQLPAGWTLRDNGDKRELRNASGKLVTEITYLNRKGKRVPISIEQHVFKYHITIQYLGD

SEQ ID NO: 426 - protein, 254 aa, Escherichia coli
MPQQIELRNIALQAAQPLVHGVSLTLKRGRVLALVGGSGSGKSLTCAATLGILPAGVRQTAGEILADGKPVSPCALRGIKIATIMQNPRSAFNPLHTMHTHARETCLALGKPADDATLTAAIEAVGLENAARVLKLYPFEMSGGMLQRMMIAMAVLCESPFIIADEPTTDLDVVAQARILDLLESIMQKQAPGMLLVTHDMGVVARLADDVAVMSDGKIVEQGDVETLFNAPKHAVTRSLVSAHLALYGMELAS

SEQ ID NO: 427 - protein, 268 aa, Escherichia coli
MTLLNVSDLSHHYAHGGFSGKHQHQAVLNNVSLTLKSGETVALLGRSGCGKSTLSRLLVGLESPSQGNISWRGESLAKLNRAQRKAFRRDIQMVFQDSISAVNPRKTVREILREPMRHLLSLKKSEQLARASEMLHAVDLDDSVLDKRPPQLSGGQLQRVCLARALAVEPKLLILDEAVSNLDLVLQAGVIRLLKKLQQQFGTACLFITHDLRLVERFCQRVMVMDNGQIVETQAVGEKLTFSSDAGRVLQNAILPAFPVRRRATEKV

SEQ ID NO: 428 - protein, 1002 aa, Escherichia coli
VAKIPARRGEAINQLKRINADEPGNTGLQNNLALLLFSSDRRDEGFAVLEQMAKSNAGREGASKIWYGQIKDMPVSDASVSALKKYLSIFSDGDSVAAAQSQLAEQQKQLADPAFRARAQGLAAVDSGMAGKAIPELQQAVRANPKDSEALGALGQAYSQKGDRANAVANLEKALALDPHSSNNDKWNSLLKVNRYWLAIQQGDAALKANNPDRAERLFQQARNVDNTDSYAVLGLGDVAMARKDYPAAERYYQQTLRMDSGNTNAVRGLANIYRQQSPEKAEAFIASLSASQRRSIDDIERSLQNDRLAQQAEALENQGKWAQAAALQRQRLALDPGSVWITYRLSQDLWQAGQRSQADTLMRNLAQQKPNDPEQVYAYGLYLSGHDQDRAALAHINSLPRAQWSSNIQELVNRLQSDQVLETANRLRESGKEAEAEAMLRQQPPSTRIDLTLADWALQRRDYTAARAAYQNVLTREPTNADAILGLTEVDIAAGDTAAARSQLAKLPATDNASLNTQRRVALAQAQLGDTAAAQQTFNKLIPQAKSQPPSMESAMVLRDGAKFEAQAGDPKQALETYKDAMVASGVTTTRPQDNDTFTRLTRNDEKDDWLKRGVRSDAADLYRQQDLNVTLEHDYWGSSGTGGYSDLKAHTTMLQVDAPYSDGRMFFRSDFVNMNVGSFSTNADGKWDDNWGTCTLRDCSGNRSQSDSGASVAVGWRNDVWSWDIGTTPMGFNVVDVVGGISYSDDIGPLGYTVNAHRRPISSSLLAFGGQKDFPSNTGKKWGGVRADGVGLSLSYDKGEANGVWASLSGDQLTGKNVEDNWRVRWMTGYYYKVINQNNRRVTIGLNNMIWHYDKDLSGYSLGQGGYYSPQEYLSFAIPVMWRERTENWSWELGASGSWSHSRTKTMPRYPLMNLIPTDWQEEAARQSNDGGSSQGFGYTARALLERRVTSNWFVGTAIDIQQAKDYAPSHFLLYVRYSAAGWQGDMDLPPQPLIPYADW

SEQ ID NO: 429 - protein, 785 aa, Escherichia coli
MKRKLFWICAVAMGMSAFPSFMTQATPATQPLINAEPAVAAQTEQNPQVGQVMPGVQGADAPVVAQNGPSRDVKLTFAQIAPPPGSMVLRGINPNGSIEFGMRSDEVVTKAMLNLEYTPSPSLLPVQSQLKVYLNDELMGVLPVTKEQLGKKTLAQMPINPLFITDFNRVRLEFVGHYQDVCENPASTTLWLDVGRSSGLDLTYQTLNVKNDLSHFPVPFFDPRDNRTNTLPMVFAGAPDVGLQQASAIVASWFGSRSGWRGQNFPVLYNQLPDRNAIVFATNDKRPDFLRDHPAVKAPVIEMINHPQNPYVKLLVVFGRDDKDLLQAAKGIAQGNILFRGESVVVNEVKPLLPRKPYDAPNWVRTDRPVTFGELKTYEEQLQSSGLEPAAINVSLNLPPDLYLMRSTGIDMDINYRYTMPPVKDSSRMDISLNNQFLQSFNLSSKQEANRLLLRIPVLQGLLDGKTDVSIPALKLGATNQLRFDFEYMNPMPGGSVDNCITFQPVQNHVVIGDDSTIDFSKYYHFIPMPDLRAFANAGFPFSRMADLSQTITVMPKTPNEAQMETLLNTVGFIGAQTGFPAINLTVTDDGSTIQGKDADIMIIGGIPDKLKDDKQIDLLVQATESWVKTPMRQTPFPGIVPDESDRAAETQSTLTSSGAMAAVIGFQSPYNDQRSVIALLADSPRGYEMLNDAVNDSGKRATMFGSVAVIRESGINSLRVGDVYYVGHLPWFERLWYALANHPILLAVLAVLAVLAAISVILLAWVLWRLLRIISRRRLNPDNE

SEQ ID NO: 430 - protein, 888 aa, Escherichia coli
VPVELFRAENASRECIMSILTRWLLIPPVNARLIGRYRDYRRHGASAFSATLGCFWMILAWIFIPLEHPRWQRIRAEHKNLYPHINASRPRPLDPVRYLIQTCWLLIGASRKETPKPRRRAFSGLQNIRGRYHQWMNELPERVSHKTQHLDEKKELGHLSAGARRLILGIIVTFSLILALICVTQPFNPLAQFIFLMLLWGGALIVRRMPGRFSALMLIVLSLTVSCRYIWWRYTSTLNWDDPVSLVCGLILLFAETYAWIVLVLGYFQVVWPLNRQPVPLPKDMSLWPSVDIFVPTYNEDLNVVKNTIYASLGIDWPKDKLNIWILDDGGREEFRQFAQNVGVKYIARTTHEHAKAGNINNALKYAKGEFVSIFDCDHVPTRSFLQMTVGWFLKEKQLAMMQTPHHFFSPDPFERNLGRFRKTPNEGTLFYGLVQDGNDMWDATFFCGSCAVIRRKPLDEIGGIAVETVTEDAHTSLRLHRRGYTSAYMRIPQAAGLATESLSAHIGQRIRWARGMVQIFRLDNPLTGKGLKFAQRLCYVNAMFHFLSGIPRLIFLTAPLAFLLLHAYIIYAPALMIALFVLPHMIHASLTNSKIQGKYRHSFWSEIYETVLAWYIAPPTLVALINPHKGKFNVTAKGGLVEEEYVDWVISRPYIFLVLLNLVGVAVGIWRYFYGPPTEMLTVVVSMVWVFYNLIVLGGAVAVSVESKQVRRSHRVEMTMPAAIAREDGHLFSCTVQDFSDGGLGIKINGQAQILEGQKVNLLLKRGQQEYVFPTQVARVMGNEVGLKLMPLTTQQHIDFVQCTFARADTWALWQDSYPEDKPLESLLDILKLGFRGYRHLAEFAPSSVKGIFRVLTSLVSWVVSFIPRRPERSETAQPSDQALAQQ

SEQ ID NO: 431 - protein, 1588 aa, Escherichia coli
MNKIFKVIWNPATGNYTVTSETAKSRGKKSGRSKLLISALVAGGMLSSFGALANAGNDNGQGVDYGSGSAGDGWVAIGKGAKANTFMNTSGSSTAVGYDAIAEGQYSSAIGSKTHAIGGASMAFGVSAISEGDRSIALGASSYSLGQYSMALGRYSKALGKLSIAMGDSSKAEGANAIALGNATKATEIMSIALGDTANASKAYSMALGASSVASEENAIAIGAETEAAENATAIGNNAKAKGTNSMAMGFGSLADKVNTIALGNGSQALADNAIAIGQGNKADGVDAIALGNGSQSRGLNTIALGTASNATGDKSLALGSNSSANGINSVALGADSIADLDNTVSVGNSSLKRKIVNVKNGAIKSDSYDAINGSQLYAISDSVAKRLGGGAAVDVDDGTVTAPTYNLKNGSKNNVGAALAVLDENTLQWDQTKGKYSAAHGTSSPTASVITDVADGTISASSKDAVNGSQLKATNDDVEANTANIATNTSNIATNTANIATNTTNITNLTDSVGDLQADALLWNETKKAFSAAHGQDTTSKITNVKDADLTADSTDAVNGSQLKTTNDAVATNTTNIANNTSNIATNTTNISNLTETVTNLGEDALKWDKDNGVFTAAHGTETTSKITNVKDGDLTTGSTDAVNGSQLKTTNDAVATNTTNIATNTTNISNLTETVTNLGEDALKWDKDNGVFTAAHGNNTASKITNILDGTVTATSSDAINGSQLYDLSSNIATYFGGNASVNTDGVFTGPTYKIGETNYYNVGDALAAINSSFSTSLGDALLWDATAGKFSAKHGTNGDASVITDVADGEISDSSSDAVNGSQLHGVSSYVVDALGGGAEVNADGTITAPTYTIANADYDNVGDALNAIDTTLDDALLWDADAGENGAFSAAHGKDKTASVITNVANGAISAASSDAINGSQLYTTNKYIADALGGDAEVNADGTITAPTYTIANAEYNNVGDALDALDDNALLWDETANGGAGAYNASHDGKASIITNVANGSISEDSTDAVNGSQLNATNMMIEQNTQIINQLAGNTDATYIQENGAGINYVRTNDDGLAFNDASAQGVGATAIGYNSVAKGDSSVAIGQGSYSDVDTGIALGSSSVSSRVIAKGSRDTSITENGVVIGYDTTDGELLGALSIGDDGKYRQIINVADGSEAHDAVTVRQLQNAIGAVATTPTKYFHANSTEEDSLAVGTDSLAMGAKTIVNGDKGIGIGYGAYVDANALNGIAIGSNAQVIHVNSIAIGNGSTTTRGAQTNYTAYNMDAPQNSVGEFSVGSADGQRQITNVAAGSADTDAVNVGQLKVTDAQVSQNTQSITNLDNRVTNLDSRVTNIENGIGDIVTTGSTKYFKTNTDGVDASAQGKDSVAIGSGSIAAADNSVALGTGSVATEENTISVGSSTNQRRITNVAAGKNATDAVNVAQLKSSEAGGVRYDTKADGSIDYSNITLGGGNGGTTRISNVSAGVNNNDVVNYAQLKQSVQETKQYTDQRMVEMDNKLSKTESKLSGGIASAMAMTGLPQAYTPGASMASIGGGTYNGESAVALGVSMVSANGRWVYKLQGSTNSQGEYSAALGAGIQW

SEQ ID NO: 432 - protein, 416 aa, Escherichia coli
MMAGTVLYQDRAMKQITFAPRNHLLTNTNTWTPDSQWPVFDVRPSGASFTGETIERVNIHTGEVEVIYRVSQGAHVGVVTVHPKSEKYVFIHGPENPHETWHYDFHHRRGVIVEGGKMNNLDAMDITVPYTSGALRGGSHVHVFSPNGEMVSFTYNDHVMHQFDSALDLRNVGVAAPFGPVNVQKQHPREYSGSHWCVLVSKTTPTPQPGSDEINRAYEEGWVGNHALAFIGDTLSPKGEKVPELFIVELPQDEAGWKAAGDAPLSGTETTLPAPPRGIVQRRLTFTHHRAYPGLVNVPRHWVRCNPQGTQIAFLMRDDNGIVQLWLISPQGGEPRQLTHNKTDIQSAFNWHPSGEWLGFVLGNRIACAHAQSGEVEYLTENHANPPSADAVVFSPDGQWLAWMEGGQLWITETDR

SEQ ID NO: 433 - protein, 460 aa, Escherichia coli
MATGKIVQVIGAVVDVEFPQDAVPRVYDALEVQNGNERLVLEVQQQLGGGIVRTIAMGSSDGLRRGLDVKDLEHPIEVPVGKATLGRIMNVLGEPVDMKGEIGEEERWAIHRAAPSYEELSNSQELLETGIKVIDLMCPFAKGGKVGLFGGAGVGKTVNMMELIRNIAIEHSGYSVFAGVGERTREGNDFYHEMTDSNVIDKVSLVYGQMNEPPGNRLRVALTGLTMAEKFRDEGRDVLLFVDNIYRYTLAGTEVSALLGRMPSAVGYQPTLAEEMGVLQERITSTKTGSITSVQAVYVPADDLTDPSPATTFAHLDATVVLSRQIASLGIYPAVDPLDSTSRQLDPLVVGQEHYDTARGVQSILQRYQELKDIIAILGMDELSEEDKLVVARARKIQRFLSQPFFVAEVFTGSPGKYVSLKDTIRGFKGIMEGEYDHLPEQAFYMVGSIEEAVEKAKKL

SEQ ID NO: 434 - protein, 501 aa, Escherichia coli
MEALLQLKGIDKAFPGVKALSGAALNVYPGRVMALVGENGAGKSTMMKVLTGIYTRDAGTLLWLGKETTFTGPKSSQEAGIGIIHQELNLIPQLTIAENIFLGREFVNRFGKIDWKTMYAEADKLLAKLNLRFKSDKLVGDLSIGDQQMVEIAKVLSFESKVIIMDEPTDALTDTETESLFRVIRELKSQGRGIVYISHRMKEIFESCDDVTVFRDGQFIAEREVASLTEDSLIEMMVGRKLEDQYPHLDKAPGDIRLKVDNLCGPGVNDVSFTLRKGEILGVSGLMGAGRTELMKVLYGALPRTSGYVTLDGHEVVTRSPQDGLANGIVYISEDRKRDGLVLGMSVKENMSLTALRYFSRAGGSLKHADEQQAVSDFIRLFNVKTPSMEQAIGLLSGGNQQKVAIARGLMTRPKVLILDEPTRGVDVGAKKEIYQLINQFKADGLSIILVSSEMPEVLGMSDRIIVMHEGHLSGEFTREQATQEVLMAAAVGKLNRVNQE

SEQ ID NO: 435 - protein, 416 aa, Escherichia coli
MSLAKASLWTAASTLVKIGAGLLVGKLLAVSFGPAGLGLAANFRQLITVLGVLAGAGIFNGVTKYVAQYHDNPQQLRRVVGTSSAMVLGFSTLMALVFVLAAAPISLGLFGNHDYQGLVRLVALVQMGIAWGNLLLALMKGFRDAAGNALSLIVGSLIGVLAYYVSYRLGGYEGALLGLALIPALVVIPAAVMLIKRGAIPLSYLKPSWDNGLAGQLSKFTLMTLITSVTLPVAYIMMRKLLAAQYSWDEVGIWQGVSSISDAYLQFITASFSVYLLPTLSRLTEKRDITREVVKSLKFVLPAVAAASFTVWLLRDFAIWLLLSNKFTAMRDLFAWQLVGDVLKVGAYVFGYLVIAKASLRFYILAEVSQFTLLMVFAHWLIPTHGALGAAQAYMATYIVYFSLCCGVFLLWRRRA

SEQ ID NO: 436 - protein, 253 aa, Escherichia coli
MSKSDVFHLGLTKNDLQGATLAIVPGDPDRVEKIAALMDKPVKLASHREFTTWRAELDGKPVIVCSTGIGGPSTSIAVEELAQLGIRTFLRIGTTGAIQPHINVGDVLVTTASVRLDGASLHFAPLEFPAVADFECTTALVEAAKSIGATTHVGVTASSDTFYPGQERYDTYSGRVVRHFKGSMEEWQAMGVMNYEMESATLLTMCASQGLRAGMVAGVIVNRTQQEIPNAETMKQTESQAVKIVVEAARRLL

SEQ ID NO: 437 - protein, 475 aa, Escherichia coli
VDFSIMVYAVIALVGVAIGWLFASYQHAQQKAEQLAEREEMVAELSAAKQQITQSEHWRAECELLNNEVRSLQSINTSLEADLREVTTRMEAAQQHADDKIRQMINSEQRLSEQFENLANRIFEHSNRRVDEQNRQSLNSLLSPLREQLDGFRRQVQDSFGKEAQERHTLTHEIRNLQQLNAQMAQEAINLTRALKGDNKTQGNWGEVVLTRVLEASGLREGYEYETQVSIENDARSRMQPDVIVRLPQGKDVVIDAKMTLVAYERYFNAEDDYTRESALQEHIASVRNHIRLLGRKDYQQLPGLRTLDYVLMFIPVEPAFLLALDRQPELITEALKNNIMLVSPTTLLVALRTIANLWRYEHQSRNAQQIADRASKLYDKMRLFIDDMSAIGQSLDKAQDNYRQAMKKLSSGRGNVLAQAEAFRGLGVEIKREINPDLAEQAVSQDEEYRLRSVPEQPNDEAYQRDDEYNQQSR

SEQ ID NO: 438 - protein, 490 aa, Escherichia coli
VDIQSFAVLSGNIYMIRKSATGVIVALAVIWGGGTWYTGTQIQPGVEKFIKDFNDAKKKGEHAYDMTLSYQNFDKGFFNSRFQMQMTFDNGAPDLNIKPGQKVVFDVDVEHGPLPITMLMHGNVIPALAAAKVNLVNNELTQPLFIAAKNKSPVEATLRFAFGGSFSTTLDVAPAEYGKFSFGEGQFTFNGDSSSLSNLDIEGKVEDIVLQLSPMNKVTAKSFTIDSLARLEEKKFPVGESESKFNQINIINHGEDVAQIDAFVAKTRLDRVKDKDYINVNLTYELDKLTKGNQQLGSGEWSLIAESIDPSAVRQFIIQYNIAMQKQLAAHPELANDEVALQEVNAALFKEYLPLLQQSEPTIKQPVRWKNALGELNANLDISIADPAKSSSSTNKDIKSLNFDVKLPLNVVTETAKQLNLSEGMDAEKAQKQADKQISGMMTLGQMFQLITIDNNTASLQLRYTPGKVVFNGQEMSEEEFMSRAGRFVH

SEQ ID NO: 439 - protein, 319 aa, Escherichia coli
VAQRDYVRRSQPAPSRRKKSTSRKKQRNLPAVSPAMVAIAAAVLVTFIGGLYFITHHKKEESETLQSQKVTGNGLPPKPEERWRYIKELESRQPGVRAPTEPSAGGEVKTPEQLTPEQRQLLEQMQADMRQQPTQLVEVPWNEQTPEQRQQTLQRQRQAQQLAEQQRLAQQSRTTEQSWQQQTRTSQAAPVQAQPRQSKPASTQQPYQDLLQTPAHTTAQSKPQQAAPVTRAADAPKPTAEKKDERRWMVQCGSFRGAEQAETVRAQLAFEGFDSKITTNNGWNRVVIGPVKGKENADSTLNRLKMAGHTNCIRLAAGG

SEQ ID NO: 440 - protein, 316 aa, Escherichia coli
MSIKEQTLMTPYLQFDRNQWAALRDSVPMTLSEDEIARLKGINEDLSLEEVAEIYLPLSRLLNFYISSNLRRQAVLEQFLGTNGQRIPYIISIAGSVAVGKSTTARVLQALLSRWPEHRRVELITTDGFLHPNQVLKERGLMKKKGFPESYDMHRLVKFVSDLKSGVPNVTAPVYSHLIYDVIPDGDKTVVQPDILILEGLNVLQSGMDYPHDPHHVFVSDFVDFSIYVDAPEDLLQTWYINRFLKFREGAFTDPDSYFHNYAKLTKEEAIKTAMTLWKEINWLNLKQNILPTRERASLILTKSANHAVEEVRLRK

SEQ ID NO: 441 - protein, 1342 aa, Escherichia coli [sequence omitted]

SEQ ID NO: 442 - protein, 281 aa, Escherichia coli
VSSGRNISCRMATRSYFFRLLQGVEMLRIADKTFDSHLFTGTGKFASSQLMVEAIRASGSQLVTLAMKRVDLRQHNDAILEPLIAAGVTLLPNTSGAKTAEEAIFAAHLAREALGTNWLKLEIHPDARWLLPDPIETLKAAETLVQQGFVVLPYCGADPVLCKRLEEVGCAAVMPLGAPIGSNQGLETRAMLEIIIQQATVPVVVDAGIGVPSHAAQALEMGADAVLVNTAIAVADDPVNMAKAFRLAVEAGLLAPQSGPGSRSYFAHATSPLTGFLEASV

SEQ ID NO: 443 - protein, 698 aa, Escherichia coli
MKKRHLLSLLALGISTACYGETYPAPIGPSQSDFGGVGLLQTPTARMAREGELSLNYRDNDQYRYYSASVQLFPWLETTLRYTDVRTRQYSSVEAFSGDQTYKDKAFDLKLRLWEESYWLPQVAVGARDIGGTGLFDAEYLVASKAWGPFDFTLGLGWGYLGTSGNVKNPLCSASDKYCYRDNSYKQAGSIDGSQMFHGPASLFGGVEYQTPWQPLRLKLEYEGNNYQQDFAGKLEQKSKFNVGAIYRVTDWADVNLSYERANTFMFGVTLRTNFNDLRPSYNDNARPQYQPQPQDAILQHSVVANQLTLLKYNAGLADPQIQAKGDTLYVTGEQVKYRDSREGIVRANRIVMNDLPDGIKTIRVTENRLNMPQVTTETDVASLKNHLAGEPLGHETKLAQKRVEPVVPKSTEQGWYIDKSRFDFHIDPVLNQSVGGPENFYMYQLGVMGTADLWLTDHLLTTGSLFANLANNYDKFNYTNPPQDSHLPRVRTHVREYVQNDVYVNNLQANYFQHLGNGFYGQVYGGYLETMFGGAGAEVLYRPLDSNWAFGLDANYVKQRDWRSAKDMMKFTDYSVKTGHLTAYWTPSFAQDVLVKASVGQYLAGDKGGTLEIAKRFDSGVVVGGYATITNVSKEEYGEGDFTKGVYVSVPLDLFSSGPTRSRAAIGWTPLTRDGGQQLGRKFQLYDMTSDRSVNFR

SEQ ID NO: 444 - protein, 202 aa, Escherichia coli
MKALTARQQEVFDLIRDHISQTGMPPTRAEIAQRLGFRSPNAAEEHLKALARKGVIEIVSGASRGIRLLQEEEEGLPLVGRVAAGEPLLAQQHIEGHYQVDPSLFKPNADFLLRVSGMSMKDIGIMDGDLLAVHKTQDVRNGQVVVARIDDEVTVKRLKKQGNKVELLPENSEFKPIVVDLRQQSFTIEGLAVGVIRNGDWL

SEQ ID NO: 445 - protein, 714 aa, Escherichia coli
MKKVVTVCPYCASGCKINLVVDNGKIVRAEAAQGKTNQGTLCLKGYYGWDFINDTQILTPRLKTPMIRRQRGGKLEPVSWDEALNYVAERLSAIKEKYGPDAIQTTGSSRGTGNETNYVMQKFARAVIGTNNVDCCARVHGPSVAGLHQSVGNGAMSNAINEIDNTDLVFVFGYNPADSHPIVANHVINAKRNGAKIIVCDPRKIETARIADMHIALKNGSNIALLNAMGHVIIEENLYDKAFVASRTEGFEEYRKIVEGYTPESVEDITGVSASEIRQAARMYAQAKSAAILWGMGVTQFYQGVETVRSLTSLAMLTGNLGKPHAGVNPVRGQNNVQGACDMGALPDTYPGYQYVKDPANREKFAKAWGVESLPAHTGYRISELPHRAAHGEVRAAYIMGEDPLQTDAELSAVRKAFEDLELVIVQDIFMTKTASAADVILPSTSWGEHEGVFTAADRGFQRFFKAVEPKWDLKTDWQIISEIATRMGYPMHYNNTQEIWDELRHLCPDFYGATYEKMGELGFIQWPCRDTSDADQGTSYLFKEKFDTPNGLAQFFTCDWVAPIDKLTDEYPMVLSTVREVGHYSCRSMTGNCAALAALADEPGYAQINTEDAKRLSIEDEALVWVHSRKGKIITRAQVSDRPNKGAIYMTYQWWIGACNELVTENLSPITKTPEYKYCAVRVEPIADQRAAEQYVIDEYNKLKTRLREAALA

SEQ ID NO: 446 - protein, 226 aa, Escherichia coli
MINVQNVSKTFILHQQNGVRLPVLNRASLTVNAGECVVLHGHSGSGKSTLLRSLYANYLPDEGQIQIKHGDEWVDLVTAPARKVVEIRKTTVGWVSQFLRVIPRISALEVVMQPLLDTGVPREACAAKAARLLTRLNVPERLWRLAPSTFSGGEQQRVNIARGFIVDYPILLLDEPTASLDAKNSAAVVELIREAKARGAAIVGIFHDEAVRNDVADRLHPMGASS

SEQ ID NO: 447 - protein, 338 aa, Escherichia coli
MNAKIIASLAFTSMFSLSTLLSPAHAEEQEKALNFGIISTESQQNLKPQWTPFLQDMEKKLGVKVNAFFAPDYAGIIQGMRFNKVDIAWYGNLSAMEAVDRANGQVFAQTVAADGSPGYWSVLIVNKDSPINNLNDLLAKRKDLTFGNGDPNSTSGFLVPGYYVFSKNNISASDFKRTVNAGHETNALAVANKQVDVATNNTENLDKLKTSAPEKLKELKVIWKSPLIPGDPIVWRKNLSETTKDKIYDFFMNYGKTPEEKAVLERLGWAPFRASSDLQLVPIRQLALFKEMQSVKGNKGLNEQDKLAKTTEIQAQLDDLDRLNNALSAMSSVSKAMQ

SEQ ID NO: 448 - protein, 742 aa, Escherichia coli
MYTQTLYELSQEAERLLQLSRQQLQLLEKMPLSVPGDDAPQLALPWSQPNIAERHAMLNNELRKISRLEMVLAIVGTMKAGKSTTINAIVGTEVLPNRNRPMTALPTLIRHTPGQKEPVLHFSHVAPIDCLIQKLQQRLRDCDIKHLTDVLEIDKDMRALMQRIENGVAFEKYYLGAQPIFHCLKSLNDLVRLAKALDVDFPFSAYAAIEHIPVIEVEFVHLAGLESYPGQLTLLDTPGPNEAGQPHLQKMLNQQLARASAVLAVLDYTQLKSISDEEVREAILAVGQSVPLYVLVNKFDQQDRNSDDADQVRALISGTLMKGCITPQQIFPVSSMWGYLANRARHELANNGKLPPPEQQRWVEDFAHAALGRRWRHADLADLEHIRHAADQLWEDSLFAQPIQMLLHAAYANASLYALRSAAHKLLNYAQQAREYLDFRAHGLNVACEQLRQNIHQIEESLQLLQLNQAQVSGEIKHEIELALTSANHFLRQQQDALKVQLAALFQDDSEPLSEIRTRCETLLQTAQNTISRDFTLRFAELESTLCRVLTDVIRPIEQQVKMELSESGFRPGFHFPVFHGVVPHFNTRQLFSEVISRQEATDEQSTRLGVVRETFSRWLNQPDWGRGNEKSPTETVDYSVLQRALSAEVDLYCQQMAKVLAEQVDESVTAGMNTFFAEFASCLTELQTRLRESLALRQQNESVVRLMQQQLQQTVMTHGWIYTDAQLLRDDIQTLFTAERY

SEQ ID NO: 449 - protein, 316 aa, Escherichia coli
MSDISKASLPKAIFLMGPTASGKTALAIELRKILPVELISVDSALIYKGMDIGTAKPNAEELLAAPHRLLDIRDPSQAYSAADFRRDALAEMADITAAGRIPLLVGGTMLYFKALLEGLSPLPSADPEVRARIEQQAAEQGWESLHRQLQEIDPVAAARIHPNDPQRLSRALEVFFISGKTLTELTQTSGDALPYQVHQFAIAPASRELLHQRIEQRFHQMLASGFEAEVRALFARGDLHTDLPSIRCVGYRQMWSYLGGEISYDEMVYRGVCATRQLAKRQITWLRGWEGVHWLDSEKPEQARDEVLQVVGAIAG

SEQ ID NO: 450 - protein, 432 aa, Escherichia coli
MGNNVVVLGTQWGDEGKGKIVDLLTERAKYVVRYQGGHNAGHTLVINGEKTVLHLIPSGILRENVTSIIGNGVVLSPAALMKEMKELEDRGIPVRERLLLSEACPLILDYHVALDNAREKARGAKAIGTTGRGIGPAYEDKVARRGLRVGDLFDKETFAEKLKEVMEYHNFQLVNYYKAEAVDYQKVLDDTMAVADILTSMVVDVSDLLDQARQRGDFVMFEGAQGTLLDIDHGTYPYVTSSNTTAGGVATGSGLGPRYVDYVLGILKAYSTRVGAGPFPTELFDETGEFLCKQGNEFGATTGRRRRTGWLDTVAVRRAVQLNSLSGFCLTKLDVLDGLKEVKLCVAYRMPDGREVTTTPLAADDWKGVEPIYETMPGWSESTFGVKDRSGLPQAALNYIKRIEELTGVPIDIISTGPDRTETMILRDPFDA

SEQ ID NO: 451 - protein, 647 aa, Escherichia coli
MIKFSATLLATLIAASVNAATVDLRIMETTDLHSNMMDFDYYKDTATEKFGLVRTASLINNARNEVKNSVLVDNGDLIQGSPLADYMSAKGLKAGDIHPVYKALNTLDYTVGTLGNHEFNYGLDYLKNALAGAKFPYVNANVIDARTKQPMFTPYLIKDTEVVDKDGKKQTLKIGYIGVVPPQIMGWDKANLSGKVTVNDITETVRKYEPEMREKGADVVVVLAHSGLSADPYKVMAENSVYYLSEIPGVNAIMFGHAHAVFPGKDFADIEGADITKGTLNGVPAVMPGMWGDHLGVVDLQLSNDSGKWQVTQAKAEARPIYDIANKKSLAAEDSKLVETLKADHDATRQFVSKPIGKSADNMYSYLALVQDDPTVQVVNNAQKAYVEHYIQGDPDLAKLPVLSAAAPFKVGGRKNDPASYVEVEKGQLTFRNAADLYLYPNTLIVVKASGKEVKEWLECSAGQFNQIDPNSTKPQSLINWDGFRTYNFDVIDGVNYQIDVTQPARYDGECQMINANAERIKNLTFNGKPIDPNAMFLVATNNYRAYGGKFAGTGDSHIAFASPDENRSVLAAWIADESKRAGEIHPAADNNWRLAPIAADKKLDIRFETSPSDKAAAFIKEKGQYPMNKVATDDIGFAIYQVDLSK

SEQ ID NO: 452 - protein, 315 aa, Escherichia coli
MQNRLTIKDIARLSGVGKSTVSRVLNNESGVSQRTRERVEAVMNQHGFSPSRSARAMRGQSDKVVAIIVTRLDSLSENLAVQTMLPAFYEQGYDPIMMESQFSPQLVAEHLGVLKRRNIDGVVLFGFTGITEEMLAHWQSSLVLLARDAKGFASVCYDDEGAIKILMQRLYDQGHRNISYLGVPHSDVTTGKRRHEAYLAFCKAHKLHPVAALPGLAMKQGYENVAKVITPETTALLCATDTLALGASKYLQEQRIDTLQLASVGNTPLMKFLHPEIVTVDPGYAEAGRQAACQLIAQVTERSEPQQIIIPANLS

SEQ ID NO: 453 - protein, 878 aa, Escherichia coli
MSYLNLRLYQRNTQCLHIRKHRLAGFFVRLFVACAFAVQAPLSSAELYFNPRFLADDPQAVADLSRFENGQELPPGTYRVDIYLNNGYMATRDVTFNTGDSEQGIVPCLTRAQLASMGLNTASVAGMNLLADDACVPLTTMVQDATAHLDVGQQRLNLTIPQAFMSNRARGYIPPELWDPGINAGLLNYNFSGNSVQNRIGGNSHYAYLNLQSGLNIGAWRLRDNTTWSYNSSDRSSGSKNKWQHINTWLERDIIPLRSRLTLGDGYTQGDIFDGINFRGAQLASDDNMLPDSQRGFAPVIHGIARGTAQVTIKQNGYDIYNSTVPPGPFTINDIYAAGNSGDLQVTIKEADGSTQIFTVPYSSVPLLQREGHTRYSITAGEYRSGNAQQEKPRFFQSTLLHGLPAGWTIYGGTQLADRYRAFNFGIGKNMGALGALSVDMTQANSTLPDDSQHDGQSVRFLYNKSLNESGTNIQLVGYRYSTSGYFNFADTTYSRMNGYNIETQDGVIQVKPKFTDYYNLAYNKRGKLQLTVTQQLGRSSTLYLSGSHQTYWGTSNVDEQFQAGLNTAFEDINWTLSYSLTKNAWQKGRDQMLARNVNIPFSHWLRSDSKSQWRHASASYSMSHDLNGRMTNLAGVYGTLLEDNNLSYSVQTGYAGGGDGNSGSTGYATLNYRGGYGNANIGYSHSDDIKQLYYGVSGGVLAHANGVTLGQPLNDTVVLVKAPGAKDAKVENQTGVRTDWRGYAVLPYATEYRENRVALDTNTLADNVDLDNAVANVVPTRGAIVRAEFKARVGIKLLMTLTHNNKPLPFGAMVTSESSQSSGIVADNGQVYLSGMPLAGKVQVKWGEEENAHCVANYQLPPESQQQLLTQLSAECR

SEQ ID NO: 454 - protein, 554 aa, Escherichia coli
MLKRIKIVTSLLLVLAVFGLLQLTSGGLFFNALKNDKENFTVLQTIRQQQSTLNGSWVALLQTRNTLNRAGIRYMMDQNNIGSGSTVAELMQSASISLKQAEKNWADYEALPRDPRQSTAAAAEIKRNYDIYHNALAELIQLLGAGKINEFFDQPTQGYQDGFEKQYVAYMEQNDRLYDIAVSDNNASYSQAMWILVGVMIVVLAVIFAVWFGIKASLVAPMNRLIDSIRHIAGGDLVKPIEVDGSNEMGQLAESLRHMQGELMRTVGDVRNGANAIYSGASEIATGNNDLSSRTEQQAASLEETAASMEQLTATVKQNAENARQASHLALSASETAQRGGKVVDNVVQTMRDISTSSQKIADIISVIDGIAFQTNILALNAAVEAARAGEQGRGFAVVAGEVRNLAQRSAQAAREIKSLIEDSVGKVDVGSTLVESAGETMAEIVSAVTRVTDIMGEIASASDEQSRGIDQVGLAVAEMDRVTQQNAALVEESAAAAAALEEQASRLTEAVAVFRIQQQQQQQRETSAVVKTVTPATPRKMAVADSGENWETF

SEQ ID NO: 455 - protein, 654 aa, Escherichia coli
MYLHLEDALVEKAKQVTWRLLAAGVCLLTVSSVARADSLDEQRSRYAQIKQAWDNRQMDVVEQMMPGLKDYPLYPYLEYRQITDDLMNQPAVTVTNFVRANPTLPPARTLQSRFVNELARREDWRGLLAFSPEKPGTTEAQCNYYYAKWNTGQSEEAWQGAKELWLTGKSQPNACDKLFSVWRASGKQDPLAYLERIRLAMKAGNTGLVTVLAGQMPADYQTIASAIISLANNPNTVLTFARTTGATDFTRQMAAVAFASVARQDAENARLMIPSLAQAQQLNEDQIQELRDIVAWRLMGNDVTDEQAKWRDDAIMRSQSTSLIERRVRMALGTGDRRGLNTWLARLPMEAKEKDEWRYWQADLLLERGREAEAKEILHQLMQQRGFYPMVAAQRIGEEYELKIDKAPQNVDSALTQGPEMARVRELMYWNLDNTARSEWANLVKSKSKTEQAQLARYAFNNQWWDLSVQATIAGKLWDHLEERFPLAYNDLFKRYTSGKEIPQSYAMAIARQESAWNPKVKSPVGASGLMQIMPGTATHTVKMFSIPGYSSPGQLLDPETNINIGTSYLQYVYQQFGNNRIFSSAAYNAGPGRVRTWLGNSAGRIDAVAFVESIPFSETRGYVKNVLAYDAYYRYFMGDKPTLMSATEWGRRY

SEQ ID NO: 456 - protein, 342 aa, Escherichia coli
MAEQTSRLAIIIDSTGAKNNADNLTSSLVKMTQAGETAANSAGKVTKATEDEKNALAKLKAAIDPVGAAIDTVGRRYSELKKFFDKGLIDKEEYEFLVRKLNETTEELSGVAQAQREAEKAGKLAAAQQEAQAQAFQRMLDKIDPLAAALRNLEQQHDELNAAFASGKINGSQFENYSRKIQETRRELTGEAQAEREAAKAHDEQVVALQRLIAQLDPVGTAFNRLVEQQKQLNEAKAKGMLSPEMYEELSGKLRAMRSELEVTQSQLSKTGMSAKQTAFAMRMLPAQMTDIVVGLSTGQSPFMVLMQQGGHSAMQETRIASLPVTAIPAGMKIPCVTAGSA

SEQ ID NO: 457 - protein, 286 aa, Escherichia coli
VIHQQHMRNIAQWLQENGITRATVAPDWMSIPCGFMACDAQRVICRIDECRGWSAGLALAPVMFRAQLNEQDLPLSLTVVGIAPEKLSAWAGADAERLTVTALPAITTYGEPEGNLLTGPWQPRVSYRKQWARWRVMILPILLILVALAVERGVTLWSVSEQVAQSRTQAEEQFLTLFPEQKRIVNLRSQVTMALKKYRPQADDTRLLAELSAIASTLKSASLSDIEMRGFTFDQKRQILHLQLRAANFASFDKLRSVLATDYVVQQDALQKEGDAVSGGVTLRRK

SEQ ID NO: 458 - protein, 230 aa, Escherichia coli
MQSITPPLIAVIGSDGSGKSTVCEHLITVVEKYGAAERVHLGKQAGNVGRAVTKLPLMGKSLHKTIERNQVKTAKKLPGPVPALVITAFVARRLLRFRHMLACRRRGLIVLTDRYPQDQIPGAYDGTVFPPNVEGGRFVSWLASQERKAFHWMASHKPDLVIKLNVDLEVACARKPDHKRESLARKIAITPQLTFGGAQLVDIDANQPLEQVLVDAEKAITDFMTARGYH

SEQ ID NO: 459 - protein, 268 aa, Escherichia coli
MTLLNISGLSHHYAHGGFNGKHQHQAVLNNVSLTLKSGETVALLGRSGCGKSTLARLLVGLESPAQGNISWRGEPLAKLNRAQRKAFRRDIQMVFQDSISAVNPRKTVREILREPMRHLLSLKKSEQLARASEMLKAVDLDDSVLDKRPPQLSGGQLQRVCLARALAVEPKLLILDEAVSNLDLVLQAGVIRLLKKLQQQFGTACLFITHDLRLVERFCQRVMVMDNGQIVETQVVGEKLTFSSDAGRVLQNAVLPAFPVRRRTTEKV

SEQ ID NO: 460 - protein, 416 aa, Escherichia coli
MMAGPVLYQDRAMKQITFAPRNHLLTNTNTWTPDSQWLVFDVRPSGASFTGETIERVNIHTGEVEVIYRASQGAHVGVVTVHPKSEKYVFIHGPENPDETWHYDFHHRRGVIVEGGKMSNLDAMDITAPYTPGVLRGGSHVHVFSPNGERVSFTYNDHVMHELDPALDLRNVGVAAPFGPVNVQKQHPREYSGSHWCVLVSKTTPTPQPGSDEINRAYEEGWVGNHALAFIGDTLSPKGEKVPELFIVELPQDEAGWKAAGDAPLSGTETTLPAPPRGVVQRRLTFTHHRAYPGLVNVPRHWVRCNPQGTQIAFLMRDDNGIVQLWLISPQGGEPRQLTHNKTDIQSAFNWHPSGEWLGFVLDNRIACAHAQSGEVEYLTEHHANSPSADAVVFSPDGQWLAWMEGGQLWITETDR

SEQ ID NO: 461 - protein, 175 aa, Escherichia coli
KHSWAGVKRTWTGKNPPNSLPYSPFIVQLSGASSSRITACVSSRRSSLPAARISSYSCALMVCNTFRVSSVFITVSPLLPPRLRRGGVVVHQAASARLSVRSVASVCGCGAHIQPGTQRLSFILCSACSAASPFFIFSASRAAPDSPASFRAAIICGFFRCPKKFAFVGCHQSRM

SEQ ID NO: 462 - protein, 777 aa, Escherichia coli
MDKNKAVQTVKDRILAGRAKQPVIFHGQLTGNMDVAIPQVPGGRKVIFDGSVNLPEGTLSQDSGTLIFQGHPVIHASISGSAPVSLNQKDWENRQFTMKTLSLKDADFHLSRNASLNSDIKSDNSHITLGSDRAFVDKNDGTGNYVIPEEGTSVPDTVNDRSQYEGNITLNHNSALDIGSRFTGGIDAYDSAVSITSPDVLLTAPGAFAGSSLTVHDGGHLTALNGLFSDGHIQAGKNGKITLSGTPVKDTANQYAPAVYLTDGYDLTGDNAALEITRGAHASGDIHASAASTVTIGSDTPAELASAETAASAFAGSLLEGYNAAFNGAITGGRADVSMHNALWTLGGDSAIHSLTVRNSRISSEGDRTFRTLTVNKLDATGSDFVLRTDLKNADKINVTEKATGSDNSLNVSFMNNPAQGQALNIPLVTAPAGTSAEMFKAGTRVTGFSRVTPTLHVDTSGGNTKWILDGFKAEADKAAAAKADSFMNAGYKNFMTEVNNLNKRMGDLRDTNGDAGAWARIMSGAGSADGGYSDNYTHVQVGFDKKHELDGVDLFTGVTMTYTDSSADSHAFSGKTKSVGGGLYASALFESGAYIDLIGKYIHHDNDYTGNFASLGTKHYNTHSWYAGAETGYRYHLTEDTFIEPQAELVYGAVSGKTFRWKDGDMDLSMKNRDFSPLVGRTGVELGKTFSGKDWSVTARAGTSWQFDLLNNGETVLRDASGEKRIKGEKDSRMLFNVGMNAQIKDNMRFGLEFEKSAFGKYNVDNAVNANFRYMF

SEQ ID NO: 463 - protein, 75 aa, Escherichia coli
RKGYDPGRSDCVHAYPHVQPDRQYHALLPVYFFLDTRWSGFMDKNKLADVCERLYLLVVYHAGRHAGFNQIPAGL

SEQ ID NO: 464 - protein, 243 aa, Escherichia coli
MKTKKLMMVALVSSTLALSGCGAMSTAIKKRNLEVKTQMSETIWLEPASERTVFLQIKNTSDKDMSGLQGKIADAVKAKGYQVVTSPDKAYYWIQANVLKADKMDLRESQGWLNRGYEGAAVGAALGAGITGYNSSSAGATLGVGLAAGLVGMAADAMVEDVNYTMITDVQIAERTKATVTTDNVAALRQGTSGAKIQTSTETGNQHKYQTRVVSNANKVNLKFEEAKPVLEDQLAKSIANIL

SEQ ID NO: 465 - protein, 483 aa, Escherichia coli
MVVIYDRSGEFVKSYYDPSIDKILNPLDARCAAWDLWKECLTQPDFDNTANTLIPMGTKEDPFWQGSGRTIFAEAAYLMRNDPNRSYSKLVDTLLSIKIEKLRTFLRNSPAANLVEEKIEKTAISIRAVLTNYVKAIRYLQGIEHNGESFTIRDWMRGVREDQKNGWLFISSNADTHASLKPVISMWLSIAIRGLLAMGENRNRRVWFFCDELPTLHKLPDLVEILPEARKFGGCYVFGIQSYAQLEDIYGEKAAATLFDVMNTRAFFRSPSHKIAEFAAGEIGEKEHLKASEQYSYGADPVRDGVSTGKDMERQTLVSYSDIQSLPDLTCYVTLPGPYPAVKLSLKYQTRPKVAPEFIPRDINPEMENRLSAVLAAREAEGRQMASLFEPEVASGEDVTQAEQPQQPQQPQQPQQPQQPQQPQQPQQPQQPQQPQQPQQPQQPQQPQQPQQPQQPQQPQQPQQPQQPTTVTTVTTASVFCHQ

SEQ ID NO: 466 - protein, 517 aa, Escherichia coli
MIVKFHARGKGGGSGPVDYLLGRERNREGATVLQGNPEEVRELIDATPFAKKYTSGVLSFAEKELPPGGREKVMASFERVLMPGLEKNQYSILWVEHQDKGRLELNFIIPNMELQTGKRLQPYYDRADRPRIDAWQTLVNHHYGLHDPNAPENRRILTLSDNLPETKQALAESVTRWIDALYHVGEIKGRQDVIQALTEAGIEVVRVTRSSISIADPNGGRNIRLKGAFYEQSFTDGRGVREKAERESRIYRENAEQRVQEARRICKRGCDIKRDENQRRYSPVHSLDREIAGKTQGRGERGDDAAQEGRVKAGREYGHDVTGDSLSPVYREWRDALVSWREDTGEPGRNQEAGRDIAQTEREDMGRGVCAGREQEISGPSVREISRGDSLSGERVGTSEGVTQNDRAGNTFAERLRAAATGLYAAAERMGERLRGIAEDVFAYATGQRDAERAGHAVESAGAALERADRTLEPVIQRELEIREERLIQEREHALSLERERQLEIQERTLDGPSLGW

SEQ ID NO: 467 - protein, 1364 aa, Escherichia coli
MNKVFSLKYSFLAKGFIAVSELARRVSVKGKLKSASSIIISPITIAIVSYAPPSLAATVNADISYQTFRDFAENKGAFIVGASNINIYDKNGVLVGVLDKAPMPDFSSATMNTGTLPPGDHTLYSPQYVVTAKHVNGSDIMSFGHIQNNYTVVGENNHNSLDIKIRRLNKIVTEVAPAEISSVGAVNGAYQEGGRFKAFYRLGGGLQYIKDKNGNLTPVYTNGGFLTGGTISALSSYNNGQMITAPTGDIFNPANGPLANYLNKGDSGSPLFAYDSLDKKWVLVGVLSSGSEHGNNWVVTTQDFLHQQPKHDFDKTISYDSEKGSLQWRYNKNSGVGTLSQESVVWDMHGKKGGDLNAGKNLQFTGNNGEIILHDSIDQGAGYLQFFDNYTVTSLTDQTWTGGGIITEKGVNVLWQVNGVNDDNLHKVGEGTLTVNGKGVNNGGLKVGDGTVILNQRPDDNGHKQAFSSINISSGRATVILSDANQVNPDKISWGYRGGTLDLNGNNVNFTRLQAADYGAIVSNNNKNKSELTLKLQTLNENDISVDVKTYEVFGGHGSPGDLYYVPASNTYFILKSKAYGPFFSDLDNTNVWQNVGHDRDKAIQIVKQQKIGESSQPYMFHGQLNGYMDVNIHPLSGKDVLTLDGSVNLPEGVITKKSGTLIFQGHPVIHAGMTTSAGQSDWENRQFTMDKLRLDAATFHLSRNAHMQGDISAANGSTVILGSSRVFTDKNDGTGNAVSSVEGSSIATTAGDQSYYSGNVLLENHSSLEVRENFTGGIEAYDSSVSVTSQNAIFDHVGSFVNSSLLLEKGAKLTAQSGIFTNNTMKIKENASLTLTGIPSVGKPGYYSPVTSTTEGIHLGERASLSVKNMGYLSSNITAENSAAIINLGDSNATIGKTDSPLFSTLMRGYNAVLQGNIMGPQSSVNMNNALWHSDRNSELKELKANDSQIELGVRGHFAKLRVKELIASNSVFLVHANNSQADQLNVTDKLQGSNNTILVDFFNKAANGTNVTLITAPKGSDENTFKAGTQQIGFSNITPEIRTENTDTATQWVLTGYQSVADARASKIATDFMDSGYKSFLTEVNNLNKRMGDLRDSQGDAGGWARIMNGTGSGESGYRDNYTHVQIGADRKHELNGIDLFTGALLTYTDNNASSQAFSGKTKSLGGGVYASGLFESGAYFDLIGKYLHHDNRYTLNFASLGERSYTSHSLYAGAEIGYRYHMSENTWVEPQMELVYGSVSGKSFNWKDQGMQLSMKDKDYHPLIGRTGVDVGRAFSGDTWKVTVRAGLGYQFDLLANGETVLQDASGKKHFKGEKDSRMLMNVGTNVEVKDNMRFGLELEKSAFGRYNIDNSINANFRYYF

SEQ ID NO: 468 - protein, 74 aa, Escherichia coli
MNWTPTTRLTSAKRFTTTLTSFTAAASHASGMTVKTSDTCSSRRRSQLACERMPGADKPVRARQRVLAGVGAQP

SEQ ID NO: 469 - protein, 203 aa, Escherichia coli
SRSQGYRRRNHANRRHRHDPADNTDGTANAHQSQFQNRKTGSKPDDAANNPGIFIRKLREFFPQRPQPLRDIFSVTRKCAANSCKTVSCGPRHCLPQVGQRTKLCLNTFIQAGLFIHLLLDLIVTILSFIDQSIDHLKGFGIITKYCLKYTCSLNVGQFSQLCQLLKHVIKTAKTPFAVSKIELYPEFLAGHDFIDVPDFLNA

SEQ ID NO: 470 - protein, 175 aa, Escherichia coli; identical to SEQ ID NO: 461

SEQ ID NO: 471 - protein, 593 aa, Escherichia coli
MSAPITGQTITFEQISETLRTQYSDAEKRLQDSSKTQVDPMRLNKNPKSLDNDIRARLENKPMLAPPEMQVLDSDNATTAKTNDARLTMILGNLTGIADQDITTRLHNNLDSTLLRHEMAHNKFRELSDAYSSSLDSAQKANDIMHQANNNYNAVDKKVQSLEKKVNALNQELSQLQPGDPQYNKVLTQKNAAEKTLTLSLQKKSLAEKSLNTAIMDADAAIGQSMEIFDEIQQQEQINNFTTNICLTQENQKNRNATATFILLITSVMEVIGDTNCESIKNQSEVMKEINHVRENKLNETARKYTKWTKVVKIVNECVTVATIAMSAILIVVGLLAAVPSGGSSIAGALALIGGIAGAVVLGVDITCQIALGTTATGWILGKVVEGLSAAIKTVDPTLLAITALLDVIGVDQDTIELVKSIYASAAASIVMATVMIGAAVICSVAIGAVVSALSKTAAEEVTKEITSTIKSTIESIIKSVSKNIIKVLNRVCSMIQTSVVVLKLIAKISNALEKIGLAICETATSIMNYCVAENSADMAILQQDMSNLSKTREQMLSVLQRVDKTVEQEVSQMVRVLQHRTETLKFASHSIV

SEQ ID NO: 472 - protein, 108 aa, Escherichia coli
MSVTKPKRLRFPGTLSWRAIVITRDVVPIKVPPKPRLLMISKRGESLARVSSTQIACTSKFAVRQGKAHQRFAAHSQPKQPGTIDKPTNVQRWAVNNGEPASFAMSGR

SEQ ID NO: 473 - protein, 127 aa, Escherichia coli
MFSCFCQQDSQINVDRGWLEDTCKNVIALPFSKLQFALSWITPRNDVVVHNNGDFYSAENLALSRGSRSFQKVVDQSSPRCFIKPYGHRNQQINITVWLQAAIHCGAVQMYGQQRRFEMALDDANYL

SEQ ID NO: 474 - protein, 81 aa, Escherichia coli
VLYIYDHVSLLPFTELPVVASAASNGRLKVTPAELVNVSGIWPQYFAFGESGLVITVKMTSSVTLFEVSRMSSALSGVDSP

SEQ ID NO: 475 - protein, 99 aa, Escherichia coli
SKANRKPCDRHIRLQYWASDSARKTGKQMASSPLPRCGKISSSLSRPSAAGYDPFPAKSSKRLPNALSASLAFAHLQLNNRLNFSPVAISKKCCFHVGY

SEQ ID NO: 476 - protein, 139 aa, Escherichia coli
AEASPISRICSSAFTSLTDFRVAGAVSENSVATRTSDGTGMLQVVSRRLASSTRSASYRDLPTSWPCAAIKVLAIPPPTISWSAILDRESRTVSLVDTLEPPTIATIGRAGSFSALPSASSSAASSGPAHATSANLPIP

SEQ ID NO: 477 - protein, 535 aa, Escherichia coli
MRISLKKSGMLKLGLSLVAMTVAASVQAKTLVYCSEGSPEGFNPQLFTSGTTYDASSVPLYNRLVEFKIGTTEVIPGLAEKWEVSEDGKTYTFHLRKGVKWHDNKEFKPTRELNADDVVFSFDRQKNAQNPYHKVSGGSYEYFEGMGLPELISEVKKVDDNTVQFVLTRPEAPFLADLAMDFASILSKEYADAMMKAGTPEKLDLNPIGTGPFQLQQYQKDSRIRYKAFDGYWGTKPQIDTLVFSITPDASVRYAKLQKNECQVMPYPNPADIARMKQDKSINLMEMPGLNVGYLSYNVQKKPLDDVKVRQALTYAVNKDAIIKAVYQGAGVAAKNLIPPTMWGYNDDVQDYTYDPEKAKALLKEAGLEKGFSIDLWAMPVQRPYNPNARRMAEMIQADWAKVGVQAKIVTYEWGEYLKRAKDGEHQTVMMGWTGDNGDPDNFFATLFSCAASEQGSNYSKWCYKPFEDLIQPARATDDHNKRIELYKQAQVVMHDQAPALIIAHSTVFEPVRKEVKGYVVDPLGKHHFENVSIE

SEQ ID NO: 478 - protein, 25 aa, Escherichia coli
PFEPRIDISLEDKFIYKRYRRDAGS

SEQ ID NO: 479 - protein, 19 aa, Escherichia coli
WRWWKPKKPASMPSKDEFR

SEQ ID NO: 480 - protein, 20 aa, Escherichia coli
RWWKPKKPASMPSKDEFRPG

SEQ ID NO: 481 - protein, 17 aa, Escherichia coli
SGRVTASGFPALDGVEA

SEQ ID NO: 482 - protein, 17 aa, Escherichia coli
AQPKTPEEVITRWQGKS

SEQ ID NO: 483 - protein, 22 aa, Escherichia coli
NMAAQGVTRPAQPKTPEEVITR

SEQ ID NO: 484 - protein, 14 aa, Escherichia coli
DDDEWGRGAGYTCL

SEQ ID NO: 485 - protein, 15 aa, Escherichia coli
SLTAGRRRLTITTPT

SEQ ID NO: 486 - protein, 22 aa, Escherichia coli
TTKIVLPAPEKFVSDAARLLQG

SEQ ID NO: 487 - protein, 20 aa, Escherichia coli
SIADPNGAGKLIAGRQRMLN

SEQ ID NO: 488 - protein, 101 aa, Escherichia coli
PAIIEYVLAVDSILCIVGITVDLFAVFFICQRHHITYLFQLRRPPADAKPCAFIKTVPNPSEKAGQLYCGRQCRKQKGATPAQPRTDKTASRMVSCTAQGE

SEQ ID NO: 489 - protein, 21 aa, Escherichia coli
YVFRDYWRDWCTARAEARRGE

SEQ ID NO: 490 - protein, 62 aa, Escherichia coli
PLLCRYRRKRGDDAGEKSDVRHRSALEAAARSDLFPRRRTAVAAERAKWRIRYHAARQRLIL

SEQ ID NO: 491 - protein, 47 aa, Escherichia coli
NRHRPARPAAVHPLPHLQQLPDKNARAGGEPRPRLENACGYPLTAAR

SEQ ID NO: 492 - protein, 33 aa, Escherichia coli
PWQRMTAVSGWSARPGRRKPHTASRSWRWGTTG

SEQ ID NO: 493 - protein, 58 aa, Escherichia coli
TDRRTGQPFRRRGDGDPASAARSRAYGDYRHSRSAGRCSGRAGDRNSRRRNCAQSSRH

SEQ ID NO: 494 - protein, 22 aa, Escherichia coli
VTNINRSVRSCLPALPGSGKQR

SEQ ID NO: 495 - protein, 38 aa, Escherichia coli
LRAGGNAEKEKTDAFARLSTRPDAGLSVAGRSWLANYG

SEQ ID NO: 496 - protein, 65 aa, Escherichia coli
GYMPAGKPLQSPRTRAVHWLPVLLQLSSAQTVWGISRWKTVRLTVLFWNPAVVWMYWRAIQHRIP

SEQ ID NO: 497 - protein, 84 aa, Escherichia coli
PGRVIHLRQLIWFENTRPVVNLKAMSRRNTVAGTKNGMWRIYKAHSPKTVKSARELSAATRITTHGWTATIVKRPSSPALSMLI

SEQ ID NO: 498 - protein, 117 aa, Escherichia coli
LMALKISPFSIAISRCCPVPTVSQPRRQPSVKRWQTSPTVWSASTASLTRWRSSAKSTARSVTITPTSPLTRKLTGISSAKSSSPRWVFNGTRTLPRLNRTTTLPNCLIALRASTPF

SEQ ID NO: 499 - protein, 33 aa, Escherichia coli
PWPRMTAVSGWSARPGRRKPHTASRNWRRGTTG

SEQ ID NO: 500 - protein, 18 aa, Escherichia coli
ARAGILPSAEKIWQTSDC

SEQ ID NO: 501 - protein, 29 aa, Escherichia coli
LPGRQSCASPLPALTASAICRKKPKMQSA

SEQ ID NO: 502 - protein, 201 aa, Escherichia coli
TNGNRVNDRSSRQHPLAIVDCGFRLLYAVAGHHHRKHRPSLNGAKPRGKSVAYAHGHCLLCADRGGDAARQRLAGGQSRRAQYFLYRYRAVYSRFTVLRAFRHAERTVAGTRVTGRWRCDDGAGRQVDGDENRTARAIYGGDDLCHVTRSGRSAARSGARRSAGGVRVVALDLFDQHSGGDYRCDRHIDVNAELHHADAAL

SEQ ID NO: 503 - protein, 29 aa, Escherichia coli
LLPILTASANCSLSPRKMPHEIAFPAITA

SEQ ID NO: 504 - protein, 37 aa, Escherichia coli
RNFAECACRSCIVYSRADVRATYFHSGGKRRPATGRT

SEQ ID NO: 505 - protein, 23 aa, Escherichia coli
SHAVSKQCAVQSGRQRLRQYGSV

SEQ ID NO: 506 - protein, 54 aa, Escherichia coli
SHRQQPRQPVSHRQRTGPTGAGYHYANVRTVAGTATEAGASATGGATAMGRHAA

SEQ ID NO: 507 - protein, 383 aa, Escherichia coli
FLVRGVMLYHTCPWLNLLNGPLMFKRRYVTLLPLFVLLAACSSKPKPTETETTTGTPSGGFLLEPQHNVMQMGGDFANNPNAQQFIDRMVNKHGFDRQQLQEILSQAKRLDSVLRLMDNQAPTTSVKPPSGPNGAWLRYRKKFITPDNVQNGVVFWNQYEDALNRAWQVYGVPPEIIVGIIGVETRWGRVMGKTRILDALATLSFNYPRRAEYFSGELETFLLMARDEQDDPLNLKGSFAGAMGYGQFMPSSYKQYAVDFSGDGHINLWDPVDAIGSVANYFKAHGWVKGDQVAVMANGQAPGLPNGFKTRYSISQLAAAGLTPQQPLGNHQQASLLRLDVGTGYQYWYGLPNFYTITRYNHSTHYAMAVWQLGQAVALARVQ

SEQ ID NO: 508 - protein, 55 aa, Escherichia coli
KRLHHGAFSAVKAAGADGRPGSNPQYRAVLHTLRRNRRYGRWSGGSVGRWHRHTH

SEQ ID NO: 509 - protein, 372 aa, Escherichia coli
FNLKKRTMKGRWVKYLLMGTVVAMLAACSSKPTDRGQQYKDGKFTQPFSLVNQPDAVGAPINAGDFAEQINHIRNSSPRLYGNQSNVYNAVQEWLRAGGDTRNMRQFGIDAWQMEGADNYGNVQFTGYYTPVIQARHTRQGEFQYPIYRMPPKRGRLPSRAEIYAGALSDKYILAYSNSLMDNFIMDVQGSGYIDFGDGSPLNFFSYAGKNGHAYRSIGKVLIDRGEVKKEDMSMQAIRHWGETHSEAEVRELLEQNPSFVFFKPQSFAPVKGASAVPLVGRASVASDRSIIPPGTTLLAEVPLLDNNGKFNGQYELRLMVALDVGGAIKGQHFDIYQGIGPEAGHRAGWYNHYGRVWVLKTAPGAGNVFSG

SEQ ID NO: 510 - protein, 22 aa, Escherichia coli
NHQAGHGAGASFFKPDRRSAKD

SEQ ID NO: 511 - protein, 55 aa, Escherichia coli
RRKRRCYRFWCHRTHWLGSHRSNGGNLVTDRAIERILVAGSDCQCTDCSVLCLVV

SEQ ID NO: 512 - protein, 51 aa, Escherichia coli
TGRHKAYASAWLIYVGRCRTRENLADGPFLSKPAGRAETAPALSPFYAAGA

SEQ ID NO: 513 - protein, 103 aa, Escherichia coli
ICMQPRWKATVFTVTPARKWTWRSAKRATPGGISATSAPKRTTSACWNKPSLNTVRAAKGNLANICIPTMKPYRGIRYREHSPPGNLYQNPLMYCFMKVYTAA

SEQ ID NO: 514 - protein, 83 aa, Escherichia coli
NIATPSPLSNASACVRISKSSKTVCGLAIRFSMPKRANAPPPDTPFRSRSTSKVANCALSAPIFCLNAWESNHEIFTAAGAAD

SEQ ID NO: 515 - protein, 50 aa, Escherichia coli
PLSLHLAPTTANPRAAYSQPGGRRTGGNYGLGTDSFAGYPAEESGEGDRR

SEQ ID NO: 516 - protein, 55 aa, Escherichia coli
INRCVYVRCMRKTSQQKPPMPGSVSRLTSRVMRKKSRLTVATGCLPMCRQSRSHG

SEQ ID NO: 517 - protein, 41 aa, Escherichia coli
DERVDCQTGAAKSRPGAQPRRTTGCRIPSGRAYRYSADSQR

SEQ ID NO: 518 - protein, 57 aa, Escherichia coli
ARISQGVTLVNSQSIHIRLPAATTGWHAANYHSRPPEFAGASPYRSYSRQEKRSTRP

SEQ ID NO: 519 - protein, 46 aa, Escherichia coli
IASERLLSLWWSATASVHCAWYRHSPGSAAARRTMFGARPHLHRAY

SEQ ID NO: 520 - protein, 61 aa, Escherichia coli
ERRSVWLVWYWSSAGRTDASLDHGDCLPRGLVHAASHASGALHLRAGRQRSGNASFWYQRQ

SEQ ID NO: 521 - protein, 32 aa, Escherichia coli
QSGKDLYYARRRADNLMRRGVDGKSTLRDSGR

SEQ ID NO: 522 - protein, 53 aa, Escherichia coli
KCWRKPISVPIKLQLSVLRTSVKPLLSGKKKPASLSITPLSGSAVVPQKSASI

SEQ ID NO: 523 - protein, 40 aa, Escherichia coli
WIKASSWPGSGAAKRAVTRYLSLLVIGSAWTARWRGYNAA

SEQ ID NO: 524 - protein, 41 aa, Escherichia coli
VADCRGFTVRQPVECGSDACDAQSSSAGNQRTFSAAGARTG

SEQ ID NO: 525 - protein, 56 aa, Escherichia coli
HRRWGSKNFMFWSLPRKKISSRRPNCSTRLKPMPKALVTRSRIFPIRLLVIPPMAY

SEQ ID NO: 526 - protein, 20 aa, Escherichia coli
KIKIMLNGKSIILPWATSGK

SEQ ID NO: 527 - protein, 43 aa, Escherichia coli
PFPFAAAVAGFRQTRGTAARKRILSTAAFPAGRFRSTRQFRLG

SEQ ID NO: 528 - protein, 93 aa, Escherichia coli
SDLRQLRDGGVGRNASVAGGDSGAGRSLDDGESAPRGSGAGTKPSGNPAGCLAPSRWSANGRSGCVCERGRRRKGNRNQRRLSVTAGDGFQPA

SEQ ID NO: 529 - protein, 41 aa, Escherichia coli
ASPGDHRTGYLWPVRSDGAGGGDGVSGNYRRPNHLGRSFLS

SEQ ID NO: 530 - protein, 71 aa, Escherichia coli
VKRITPGWRSMTLCTRQSGDMRKTHSHSCTLRANLPLSTSPTSGTARSGRHWCRISILPLPPHRKKTKRCV

SEQ ID NO: 531 - protein, 75 aa, Escherichia coli
RPRSGHLSGGETLPRMAATSRSGYPFLNLIYLWRTGLGRNAKNNSGLERLFTDPRFTHRPDVCRLSAHQPRYRIL

SEQ ID NO: 532 - protein, 559 aa, Escherichia coli
MTQFTQNTAMPSSLWQYWRGLSGWNFYFLVKFGLLWAGYLNFHPLLNLVFAAFLLMPIPRYSLHRLRHWIALPIGFALFWHDTWLPGPESIMSQGSQVAGFSTDYLIDLVTRFINWQMIGAIFVLLVAWLFLSQWIRITVFVVAILLWLNVLTLAGPSFSLWPAGQPTTTVTTTGGNAAATVAATGGAPVVGDMPAQTAPPTTANLNAWLNNFYNAEAKRKSTFPSSLPADAQPFELLVINICSLSWSDIEAAGLMSHPLWSHFDIEFKNFNSATSYSGPAAIRLLRASCGQTSHTNLYQPANNDCYLFDNLSKLGFTQHLMMGHNGQFGGFLKEVRENGGMQTELMDQTNLPIILLGFDGSPVYDDTAVLNRWLDVTEKDKNSRSATFYNTLPLHDGNHYPGVSKTADYKARAQKFFDELDAFFTELEKSGRKVMVVVVPEHGGALKGDRMQVSGLRDIPSPSITDVPVGVKFFGMKAPHQGAPIVIDQPSSFLAISDLVVRVLDGKIFSEDNVDWKKLTSGLPQTAPVSENSNAVVIQYQDKPYVRLNGGDWVPYPQ

SEQ ID NO: 533 - protein, 488 aa, Escherichia coli
MINRQLSRLLLCSILGSTTLISGCALVRKDSAPHQQLKPEQIKLADDIHLASSGWPQAQWWKQLNDPQLDALIQRTLSGSHTLAEAKLREEKAQSQADLLDAGSQLQVAALGMLNRQRVSANGFLSPYAMDAPALGMDGPYYTEATVGLFAGLDLDLWGVHRSAVAAAIGAHNAALAETAAVELSLTTGVAQLYYSMQASYQMLDLLEQTRDVIDYAVKAHQSKVAHGLEAQVPFHGARAQILAVDKQIAAVKGQITETRESLRALIGAGASDMPEIKPVALPRVQTGIPATLSYELLARRPDLQAMRWYVQASLDQVDSARALFYPSFDIKAFFGLDSIHLDTLFKKTSRQFNFIPGLKLPLFDGGRLNANLEGTRAASNMMIERYNQSVLNAVRDVAVNGTRLQTLNDEREMQAERVEATRFTQRAAEAAYQRGLTSRLQATEARLPVLAEEMSLLMLDSRRVIQSIQLMKSLGGGYQASPVVEKK

SEQ ID NO: 534 - protein, 64 aa, Escherichia coli
RLRLSSQTGDSAVMVTSGCPSTPCVFSSLRMACVSMACSRTPLTCATLSSPAFTLAAKSPASRA

SEQ ID NO: 535 - protein, 90 aa, Escherichia coli
AMELTCAQLRPGPTPRASPNGVSGSSFACCPAWARSTLTQTAPASSAPSSASRFGSRIFVRSHTSTTRPDLSTSRIWSRMVVTCTPSSRR

SEQ ID NO: 536 - protein, 94 aa, Escherichia coli
AGRTGFQPGRVADHHPREQKQRGGEFSHNAKLQFSRVQRHDESDARSHHGLQSTIGRRGCRRQSGREASAGSQLSGGRFPGNDKGAVGRPAPGL

SEQ ID NO: 537 - protein, 78 aa, Escherichia coli
RANPNYSWLRNARTGNVMQRAAEKIPPAAPDASGGECASGNSTRAGFKRSEGAGWSGSGVNHPYAPAFTGKQSGYPLS

SEQ ID NO: 538 - protein, 64 aa, Escherichia coli; identical to SEQ ID NO: 534

SEQ ID NO: 539 - protein, 100 aa, Escherichia coli
DAPAISMRVYPDVGTYATATARYRGLTSSDVSGLPVNGRLRPARRSSPARKRRDRSGRFPGRSSVPSPAVGTRTWRQTGTPGSRAYRYGYAYRYSSAPVQ

SEQ ID NO: 540 - protein, 65 aa, Escherichia coli
RTSDERSHRRGAVHHALPGRSLRSPASPCGRPQRGSYPLSPDQRHGTGYPHQSPHQPEYPVQPVL

SEQ ID NO: 541 - protein, 94 aa, Escherichia coli
RLFSRRDAPAGCSAPVGSGSQCRPAYLPHSSPAALRAALRARGQSPHGVNPARPAARYRGSAQCRNRKPAFPAPYRPRLSPPPPDAQSTGWRYL

SEQ ID NO: 542 - protein, 164 aa, Escherichia coli
ARFGNATRTRRVNNNDTKHHCAQRIHGQIAVDEAVRKRSVLISLSRRADRTRRPDNRGNRQDDQRDNFQRRKEVAHGIQQLARIERNQNNDSEIDQAVDKQRQRGITRQRRNPHFKRNGSCTRRSEKRPHRQVTNRCQQYASDFTDWRAEAVNTAANFCQRHYR

SEQ ID NO: 543 - protein, 211 aa, Escherichia coli
IGTPVEVGEADVAQLTAPQIGNRHKVFNFETVTVPLVFVRCAIVLPLVFRIDVHGQAHRQASVDIGTQTHVPGALATIFITTHVVNVVVREVPLFERTEAKVSIGQLVDGETWFDFHKQRRTVVPDTFCIGVTAEEYRRIRITIEVEPVFFSECFVLKVGIVADLRSETGVIASDNVNALVPPVGKILRFVVFSCVDSKRRRERQYRTGCQ

SEQ ID NO: 544 - protein, 59 aa, Escherichia coli
VLLIFTRPVITAVRIIPGDKAPPLPSGNHCQCNSPESECEEGKQKYHNNQPVMVPTSRP

SEQ ID NO: 545 - protein, 121 aa, Escherichia coli
SVADFALGSVGLSAPDYQCHQSPAGRSAASQACHPDAGSHRPVVGSVPDRPVALYAPVRAFPATVRYHRYPTRRNQALPGCCYYSVPVPARRANHSPRPGHYDVGDKLSPAQRKRWQKAQY

SEQ ID NO: 546 - protein, 70 aa, Escherichia coli
IPHCSCSLVQLVFVTAESFCRHAPPHFVVAPESVEQHNGQKYQHDYQHNTQRQLTGSAVPQRQAGDWTHA

SEQ ID NO: 547 - protein, 29 aa, Escherichia coli
ASPVLVQKLQMTQGTDILPGLFDTGQQCC

SEQ ID NO: 548 - protein, 84 aa, Escherichia coli
VGAKIPENSITQCCQHMLVNTTSSALIRLSGEIVAIANNPGAVSQRRFDDRFYQLNARGIKHQNFGFIGNDFIAYRFDIQHQAS

SEQ ID NO: 549 - protein, 114 aa, Escherichia coli
IRHIPFFVPATVFRRDIAFKFTTGRVFSNHINCRRWITRPGHESCRATHYFYAFKQCHIRKCVAQIPARFKIGGDTINHIVIDLESAGIIKSTIGIRLTFADPQRVFHHFAQRL

SEQ ID NO: 550 - protein, 138 aa, Escherichia coli
LAVTLISATAANSPLPDTTGMLTLPAATPFTVMVIPLTDTVAFVLSADTARKLLSVAPSGWNATVSVVLCPFTTEVLAGVTVMPVAAVTVLRSSAIDGRPTLVTFTVRVITSFAVTALPILLTQPRNTSTVPFGKRIL

SEQ ID NO: 551 - protein, 60 aa, Escherichia coli
LACRRWSRHPSSVLRLSLQSGAGRYPAGRVSPPGLSLPDKHPAGRTSSRVHRSNVWCPYS

SEQ ID NO: 552 - protein, 41 aa, Escherichia coli
HRQFLRLFDNMLHFRADSDNLTEGADVLGGDILQLTAHTNR

SEQ ID NO: 553 - protein, 106 aa, Escherichia coli
RPEKPAPARELQAHNHEPMWQPALRRRSARSLPPLPARPGCRWQQNGQTHRHPALNAQEMGYNHGAPKFVHALGHPMHKKQYLASPVHQRYVVDDQNVHDRDEIRR

SEQ ID NO: 554 - protein, 38 aa, Escherichia coli
SRPVLRADARHPGYCVYPVLRQTGTQRYRLAPARSSAK

SEQ ID NO: 555 - protein, 45 aa, Escherichia coli
RYPNPCGIRQRHHRTVGLRYSIDAEKGKYGYKNDQRCNQLHYTYT

SEQ ID NO: 556 - protein, 22 aa, Escherichia coli
KIEHILSLCLDSMHQTGHFIFY

SEQ ID NO: 557 - protein, 167 aa, Escherichia coli
RNGITAKRCRDISHSKAFADGCEENHHQRKTDSGGKTVQRRLQEIVPEIDIQQRHAEHGTVGGDKRQKNPQQTVKHRAGFAHHHLGELHDHSNHQNKCQGAQVNQIKWDQNPRIDKPGANRRQRHHKRCCQPHAHRGFQLFGNPHKRTETEKLDQYKVIDQYSSDKQ

SEQ ID NO: 558 - protein, 225 aa, Escherichia coli
KSRPANLSLNTFVGCGASALSDLRFAISGRPGKTRTASHQAHCQCRMRRERLFRPTVRYLWYMPDKTRIASHQAHCQCRMRCERPIRLTAFLAALCQSDSTPASSPYAHAVYAAKSLAESNKVPAHPQWFHVLRQWLPQGYPDLPAHQRTYRLPPATICGPYNRNLQHRHSTYPAPEQRYLPRWCHRASLRRNHALDAADGWQCAAYRERDEQLPARRHHSSQAP

SEQ ID NO: 559 - protein, 159 aa, Escherichia coli
LRLRRCQSCVIRLSGRVSGLRTISNPCGAMMLPSTYRLPPRNRCCICCSPICRPRDSADSRHSLASNSWLSGKGRCCLRLCVQLCISSLLFFACLSRSERISARRSCRFSERIHSFTSTPSGSCGHGAGRSSGCSVPLLSVSCTRGQLLPRVQGAAGPP

SEQ ID NO: 560 - protein, 51 aa, Escherichia coli
HVAYTNARSLPAITHRDFVTASVSSSGAARIRGRYPMLSSCSATSSAYIPV

SEQ ID NO: 561 - protein, 36 aa, Escherichia coli
ASDFPVAAYPLKDTKQRQIAINKPHRIPIHSITNQS

SEQ ID NO: 562 - protein, 66 aa, Escherichia coli
CSGAIPCTTIPPPTRNIASVPTIDNAFISQGAIINNPLPNACISALDFSASQYPRSSILTITPTRP

SEQ ID NO: 563 - protein, 71 aa, Escherichia coli
ATFMLFTSLNPWRKMPSVEAATFSAVAEKAEVYFSNIARLSSNIRINSAAPTVLVTIIGAAILLTRRTASS

SEQ ID NO: 564 - protein, 55 aa, Escherichia coli
SPFADYHLRANQFASDAPVFLPASNQSPTGYRFSSASYPVNQLYFCSCEYWKLTS

SEQ ID NO: 565 - protein, 113 aa, Escherichia coli
SLMQGVPPLHGVMNNRQIHHANQHQDTCRTARQTAVVEGVPQGNHTHIQKQQHQFRSQTCIPYPPGAPHRFSPCRAGNQGNKGKHGTNGGHRRHRQVGHFHLPDKANKRRHRH

SEQ ID NO: 566 - protein, 34 aa, Escherichia coli
SDQRKTRYPDKQTSRYAAPAFASWETPAGAETLL

SEQ ID NO: 567 - protein, 114 aa, Escherichia coli
RNRRITTPKIAILLAVARKVETGAGAPWYTSGVHRWNGTRESLKPRPTIIRPKPASNSGSFSIPSPRFLPSATNDRSPDCAYTSAIPNSRKEDAAAERMVYLILASSERFWRKA

SEQ ID NO: 568 - protein, 159 aa, Escherichia coli
QNAGDRTDNFNGAHHLTGFIARGHKDRIQTGDQFPAKQEFHYRSGKTEGDQCNEEFGEDLEAVDHFFWDEFQPQRHQNRNNDHRDHVHQDQGESEFHRLAVDLNTGVHSNQTTSDTTNRNGHNARQHAERQITTVRRFDNAERHRNGKHNRWPHHRPEN

SEQ ID NO: 569 - protein, 187 aa, Escherichia coli
PTSAPSFYASIAISWLSASPPCPTTNTRLASANGSRVTFFRFSMLTSQSGSAPGTMFSCCIPEGNVAFLSAPAWRARERHSGRFSVCSVAVSAFPQWDLRTLTIGISNEVTWQMLAPCKRQASRVDSSSPNVPGGKRTTFAGVRCHCSTSASSTCSTTTGCGSICQCARVQPLKSCAASQPANAAFS

SEQ ID NO: 570 - protein, 139 aa, Escherichia coli
AEASPISRICSSAFTSLTDFRVAGAVSENSVATRTSDGTGMLQVVSRRFASSTRSASYRDLPTSWPCAAIKVLAIPPPTISWSAILDRESRTVSLVDTLEPPTIATIGRAGSFSALPSASSSAASSGPAHATSANLPIP

SEQ ID NO: 571 - protein, 40 aa, Escherichia coli
AKEHRDLCADDHTNSTYSAHDRAAFTADQMTTGRTNHHGQ

SEQ ID NO: 572 - protein, 190 aa, Escherichia coli
RARLQRRFAPAANELEHLNDKFNFANAACAEFDIVGQTTSTHFTGNHSFHVAQRLNHAEIDVTTENKRAQHRTQLVSIDAFAIAHNPRLDHRVTLPVAPLLLVIIFQRGKAQHQRATFAKRTQPHIHAIDEAILRWLIQHFNQPLPHAGKKLRVIQFPASTLRTTMFRPGKNQIDIRGEIQFPAAQLTHA

SEQ ID NO: 573 - protein, 48 aa, Escherichia coli
TQVTLRKSGVSQRECGPVRHRRNHAEHAAPTPVRRTADNGSAGAFYAP

SEQ ID NO: 574 - protein, 129 aa, Escherichia coli
RGSATQIPGAFWSDVGSRAGSAQLQLNMVVRQHLHHAYWRRGVGVDGIYHADATHIDHRVTAKFRVIDNQHNVARVLNNGAFGANFVVIELQQRAVAIDAAYPQNAEIKAELGDKIERRFANDPAIAAA

SEQ ID NO: 575 - protein, 106 aa, Escherichia coli
PKDTLWSRLQSQVLSEIQRADDEEVTGKVAGRSNRVVRTEASAIVTTQPDKVTDKQQRSADKRRECRSGRTEEPQFTCQPHHHQRHADKRADRPTILFQPRPDNRQ

SEQ ID NO: 576 - protein, 70 aa, Escherichia coli
RRDDVGDQQCRDHHRKDDTTGQRCAKNTYGQVGSEKDKRKAKRAPGGMETKNGDGKLNQIVTGGDHQQMK

SEQ ID NO: 577 - protein, 120 aa, Escherichia coli
HQRIVLQLLAAYAGECGIKLGEDPLCLRFAAVLQAGAGVGVNQAVAMLPEKRSPRLLAGGIHWPFNVAERSGFLQQRQPLLSDQRISLFTGADQPHQLAVKTLHKAVIQRRRNIAHRLFG

SEQ ID NO: 578 - protein, 76 aa, Escherichia coli
DAEIKMQRLPQPGAVLHIQRLIQSQHGAGRGQHLRRRRQVRQTQIIERRVAGTEAQHQKNDHRGGEHHRDQQQKAA

SEQ ID NO: 579 - protein, 25 aa, Escherichia coli
GQIVRQSYNQTATRPGPALTARRSR

SEQ ID NO: 580 - protein, 147 aa, Escherichia coli
LAMKVPLSLQRYCFDSVLAFSWLEEIARALIPGRMRCKPETITRSPACKPEVTTHWSPMALLASISRSFTTSSLSRMSAVALPWALWVTPSCGTSNTFWRLPSSTNAVTYMPGSKSPFGLGKIARNVTEPVVSSTVGSENFSVPVWL

SEQ ID NO: 581 - protein, 87 aa, Escherichia coli
STLNTSSCGSASSSRQITQPQPSGARPNLWPEALIDFTRGRRKSQTISGATNGARKPPLAASMCMSMSIPVSAWNLSSASCSGCGNS

SEQ ID NO: 582 - protein, 182 aa, Escherichia coli
GGSNDYAAFPFAIGASAVGNSLPSPCTSESCVISLIDFAPVSVIATFISFSIRFSRLATPAWPAVASAYRKARPSSTVSAPSAIIRTTSSPLRIPLSARMAISPFTASAIAGNARAEESTPSSWRPPWLETTIPSAPKRTASRASSGSRIPLITIGPSQKSRIHSRSFHEMDGSKLFPSQPM

SEQ ID NO: 583 - protein, 75 aa, Escherichia coli
APRYAARQVVKRIRRAAPGARPLSVVGQNAGQYFASPGRGESAGGSRSPNVHGFYHGPCHRLSVCHDHSRGYAGY

SEQ ID NO: 584 - protein, 163 aa, Escherichia coli
PRINGNHRPFDNVGGGSLHWRVNGCTFSRCTTSTIAGFDIRQIQTASVQRFNVALLFRLSTGAFHILQHARVAFEVKVHVLLRFFTWNVQLPRQTESTHAINQTKVDRFRATALLAGDGFQWQTKHFCRRCPVDIFSFRECGQQAFVTREMRHNAQFNLRVVR

SEQ ID NO: 585 - protein, 146 aa, Escherichia coli
HRWRCSGHREFQTAEQPASQTRYPLLSAAGGQPARRTAFSPSRSRRRQWSLAVLRQSPGRYRALRAFRRLVASCAAEADVWSSVRGSGTPVCRPLTSFRSRRYRGSGSARPALRYDACSPDGYQYGPAVRRNISRGAGCRADRRWR

SEQ ID NO: 586 - protein, 74 aa, Escherichia coli
EERSELVAIHAPNRKIGASTNSNSTILSSQGMTSSVNNSARIAPQKAPPKRSTIFWYDEPTFGLATITQVSIQV

SEQ ID NO: 587 - protein, 98 aa, Escherichia coli
RHHQSRPPADKATPRASRNPASSTAPAAVTRRESTRKECATSARSDPESLCRLSPPNVQENGNSGASKYCNRPESTRQTAAKSSLCWSASSHWLCPTD

SEQ ID NO: 588 - protein, 74 aa, Escherichia coli
SSGTRPASGRPRQWHYPAHPRPGCNASSQPRPAPGDASCRRFAGADAPGPADAAVTSGCRPSQSARYGDAETGC

SEQ ID NO: 589 - protein, 40 aa, Escherichia coli
VSVRHHVAVSGYQKALSSRGRKRPPVQASSSGSCCRCGRE

SEQ ID NO: 590 - protein, 75 aa, Escherichia coli
RFRTWHFVQLNASTLLLWHAVLREKAPVVFALQNKSRYPPHPLHAKVSVHRPVFATAMPSGWVPVRQNLARSTAF

SEQ ID NO: 591 - protein, 55 aa, Escherichia coli
LRTRHFTVKLRHLLAQHDWVTPNHHIQKTADDQSSDGCQDGHRRGVLLKNIKKHG

SEQ ID NO: 592 - protein, 108 aa, Escherichia coli
MSVTKPKRLRFPGTLSWRAIVITRDVVPIKVPPKPRLLMISKRGESLARVSSTQIACTSKFAVRQGKAPQRFAAHSQPKQPGTIDKPTNVQRWAVNNGEPASFAMSGR

SEQ ID NO: 593 - protein, 437 aa, Escherichia coli
QCDQVLWSYCHGDLRPCSSNGINKPLLDIANRGMRGIQNRLRIEAQQYQQHHQQQDHKQLTQRHPWQFLAGNLAFRFTEVSAMQHRQRINRCKDQPKGRDNGNHRDNLEAAEQNHKFADEVTGARHPKRCHRKEQRQCWQPFHLAPQTAHHAHVAGMDTFIKLTAENKQTRCRQAVRNHLDYRALVGQLAAGIDSNQHEAHVGNRGVGDQTFDIGLGEGHPRTVEDADNTQPHGDWRELCRRVREQRQGETQQTISSGFQQDPREVHGTGGRSLGVRIRQPAMQRYHRHFHRKRDEEAQHQQIFHAVRHWRIQQLFIVEGPDASRIVVNKNQRQDGDQHHQTTRLGVNEELGCRRDTRFTVRGFMPPQCDQEVHRHQHHFPEEEEQEHVDGKEHADNAAQDPHQVEVEEALVFFDLFPRTEYRQHTEQTGQHDHQQR

SEQ ID NO: 594 - protein, 45 aa, Escherichia coli
REAPARRAAVASRFHPRPFGLAMRNTVQTGAPPARQETARRQNPS

SEQ ID NO: 595 - protein, 39 aa, Escherichia coli
ASCFALPWQRTTAVSGWSAWPGRRKPHTASGNWRWGVTR

SEQ ID NO: 596 - protein, 98 aa, Escherichia coli
GWFRGGRCDGEHAAGEGDRCVRQCACRTDGQRDGRQQRNVVSDGHHRAGRHGGDQCHQPDGGSQYSHCQHQQQQPEPERHVYRRCQDGADRESGGEAG

SEQ ID NO: 597 - protein, 61 aa, Escherichia coli
TYGCASPSRKPRVMPLVTAQVPITALRVNSSSIPAQSAVETTSNRPPTMGVPAFRPVSAAV

SEQ ID NO: 598 - protein, 107 aa, Escherichia coli
KIATRGNSAKAETTGELNSPRLPNTSTGSAVSSWFTGNRQVRINTPQIAPRPNAIRLFIASTPRISVGRKSNHALSSPVFRVKEIPTEATKPMLRPKAILPASRRFI

SEQ ID NO: 599 - protein, 30 aa, Escherichia coli
TTSGYLPVSALMAATSSSTQSKRWKARNAT

SEQ ID NO: 600 - protein, 142 aa, Escherichia coli
TCIVALLLLSVTVSQGNLLSGRNSSGTFSSSPSVALNATRGTGFNWRPSTWSILLSRESSCIPRSEPIKAWNSSITMYATEENACLSQPNEFMSKDSSDSGVISKMPEGVVRAFFFLLCGTSPCQGVTCISRASPRLSRRRC

SEQ ID NO: 601 - DNA, 1914 bp, Escherichia coli
atgggtaaaataattggtatcgacttgggtactaccaactcttgtgtagcgattatggatggcaccactcctcgtgtgctggagaatgccgaaggcgatcgcaccacgccttctatcattgcctatacccaggatggtgaaactctggttggtcagccggctaaacgtcaggcagtgacgaacccgcaaaacaccctgtttgcgattaaacgcctgattggccgccgcttccaggacgaagaagtacagcgtgatgtttccatcatgccgttcaaaattattgctgctgataacggcgacgcatgggtcgaagttaaaggccagaaaatggcaccgccgcagatttctgctgaagtgctgaaaaaaatgaagaaaaccgctgaagattacctgggtgaaccggtaactgaagctgttatcaccgtaccggcatactttaacgatgctcagcgtcaggcaaccaaagacgcaggccgtatcgctggtctcgaagtaaaacgtatcatcaacgaaccgaccgcagctgcgctggcttacggtctggacaaaggtactggcaaccgtactatcgcggtttatgacctgggtggtggtactttcgatatttctattattgaaatcgacgaagttgacggcgaaaaaaccttcgaagttctggcaaccaacggtgatacccacctgggtggtgaagacttcgacagccgtctgatcaactatctggttgaagaattcaagaaagatcagggcattgacctgcgcaacgatccgctggcaatgcagcgcctgaaagaagcggcagaaaaagcgaaaatcgaactgtcttccgctcagcagaccgacgttaacctgccgtacatcactgcagacgcgaccggtccgaaacacatgaacatcaaagtgactcgtgcgaaactggaaagcctggttgaagatctggttaaccgttccatcgagccgctgaaagttgcactgcaggacgctggcctgtctgtatctgatatcgacgacgttatcctcgttggtggtcagactcgtatgccaatggttcagaagaaagttgctgagttctttggtaaagagccgcgtaaagacgttaacccggacgaagctgtagcaatcggtgctgctgttcagggcggtgttctgactggtgacgtaaaagacgtactgctgctggacgttaccccgctgtctctgggtatcgaaaccatgggcggtgtgatgacgacgctgatcgcgaaaaacaccactatcccaaccaagcacagccaggtgttctctaccgctgaagacaaccagtctgcggtaaccatccatgtgctgcagggtgaacgtaaacgtgcggctgataacaaatctctgggtcagttcaacctggatggtatcaacccggcaccgcgcggcatgccgcagatcgaagttaccttcgatatcgatgctgacggtatcctgcacgtttccgcgaaagataaaaacagcggtaaagagcagaagatcaccatcaaggcgtcttctggtctgaacgaagatgaaatccagaaaatggtacgcgacgcagaagctaacgccgaagctgaccgtaagtttgaagagctggtacagactcgcaaccagggcgaccatctgctgcacagcacccgtaagcaggttgaagaagcaggcgacaaactgccggctgacgacaaaactgctatcgagtctgcgctgactgcactggaaactgctctgaaaggtgaagacaaagccgctatcgaagcgaaaatgcaggaactggcacaggtttcccagaaactgatggaaatcgcccagcagcaacatgcccagcagcagactgccggtgctgatgcttctgcaaacaacgcgaaagatgacgatgttgtcgacgctgaatttgaagaagtcaaagacaaaaaa

SEQ ID NO: 602 - DNA, 1698 bp, Escherichia coli
atggcgattgcaattggcctcgattttggcagtgattctgtgcgagctttggcggtggactgcgccagcggtgaagagatcgccaccagcgtagagtggtatccccgttggcaaaaagggcaattttgtgatgccccgaataaccagttccgtcatcatccgcgtgactacattgagtcaatggaagcggcactgaaaaccgtgcttgcagagcttagcgttgaacagcgcgcagctgtggtcgggattggcgttgacagtaccggctcgacgcccgcaccgattgatgccgacggtaacgtgctggcgctgcgcccggagtttgccgaaaacccgaacgcgatgttcgtattgtggaaagaccacactgcggttgaagaagcggaagagattacccgtttgtgccacgcgccgggcaacgttgactactcccgctatattggcggtatttattccagcgaatggttctgggcaaaaatcctgcatgtgactcgccaggacagcgccgtggcgcaatctgccgcatcgtggattgagctgtgcgactgggtgccagctctgctttccggtaccacgcgcccgcaggatattcgtcgcggacgttgcagcgccgggcataagtcgctatggcacgaaagctggggcggcctgccgccagccagtttctttgatgagctggacccgatcctcaatcgccatttgccttccccgctgttcactgacacctggactgccgatattccggtgggcaccttatgcccggaatgggcgcagcgtctcggcctgcctgaaagcgtggtgatttccggcggcgcgtttgactgccatatgggcgcagttggtgcaggcgcacagcctaacgcactggtaaaagttatcggtacttccacctgcgacattctgattgccgacaaacagagcgttggcgagcgggcagtgaaaggtatttgcggtcaggttgatggcagcgtggtgcctggatttatcggtctggaagcaggccaatcggcgtttggtgatatctacgcctggttcggtcgcgtactcggctggccgctggaacagcttgccgcccagcatccggaactaaaagagcaaattaacgccagccagaaacaactgcttccggcgctgaccgaagcatgggccaaaaatccgtctctggatcacatgccggtggtgctcgactggtttaacggccgccgcacaccgaacgctaaccaacgcctgaaaggggtgattaccgatcttaacctcgctaccgatgctccgctgctgttcggcggtttgattgctgccaccgcctttggcgcacgcgcaatcatggagtgctttaccgatcaggggatcaccgttaataacgtgatggcgctgggcggcatcgcgcggaaaaaccaggtcattatgcaggcctgctgcgacgtgctgaatcgcccgctgcaaattgttgcctctgaccagtgctgtgcgctcggtgcggcgatttttgctgccgtcgccgcgaaagtgcacgcagacatcccctcagcccagcaaaaaatggccagtgcggtagagaaaaccctgcaaccgcgcagcgaacaggcacaacgctttgaacagctttatcgccgctatcagcaatgggcgatgagcgccgaacaacactatcttccaacttccgccccggcacaggctgcccaggccgttccgactcta

SEQ ID NO: 603 - DNA, 1485 bp, Escherichia coli
gtggcagatcgtaatttgcgcgaccttcttgctccgtgggtgccagacgcaccttcgcgagcactgcgagagatgacactcgacagccgtgtggctgcggcgggcgatctctttgtagctgtagtaggtcatcaggcggacgggcgtcgatatatcccgcaggcgatagcgcaaggtgtggctgccattattgcagaggcgaaagatgaggcgaccgacggtgaaatccgtgaaatgcacggcgtaccggtcatctatctcagccagctcaatgagcgtttatctgcactggcgggccgcttttaccatgaaccctctgacaatttacgtctcgtaggcgtaacgggcaccaacggcaaaaccacgacgacccagctgctggcgcagtggagccaactgcttggcgaaaccagcgcggtaatgggcaccgttggtaacggtctgctggggaaagtgatcccgacagaaaatactaccggttcggcagtcgatgttcagcatgagctggcggggctggtggatcagggcgcgactttttgcgcaatggaagtttcctcccacgggctggtacagcaccgtgtggcggcattgaaatttgcggcgtcggtctttaccaacttaagccgcgatcaccttgattatcatggtgatatggaacactacgaagctgcgaaatggctgctttattctgaacatcattgcggtcaggcgattattaacgccgacgatgaagtgggccgccgctggctggcaaaactgccggacgcggttgcggtatcaatggaagagcatatcaatccgaactgtcacggacgctggttaaaagcgatcgacgtgaactatcacgacagcggtgcgacgattcgctttagctcaagttggggcgatggcgaaattgaaagccatctgatgggcgcttttaacgtcagcaacctgctgctcgcgctggcgacactgttggcactcggctatccattggctgatctgttgaaaaccgccgcgcgtctgcaaccggtttgcggacgtatggaagtgttcactgcgccaggcaaaccgacggtggtggtggattacgcgcatacgccggatgcactggaaaaagccttacaggcggcgcgtctgcactgtgcgggcaagctgtggtgtgtctttggctgtggtggcgatcgcgataaaggtaagcgtccactgatgggcgcaattgccgaagagtttgctgacgtggcggtggtgacggacgataacccgcgtaccgaagaaccgcgtgccatcatcaacgatattctggcgggaatgttagatgccggacatgccaaagtgatggaaggccgtgctgaagcggtgacttgcgccgttatgcaggctaaagagaacgatgtggtgctggtcgcgggcaaaggccatgaagattaccagattgttggcaatcagcgtctggactactccgatcgcgtcacggtggcgcgtctgctgggggtgattgca

SEQ ID NO: 604 - DNA, 1663 bp, Escherichia coli
aaaagcgatccttccggcaccgcaagggatgcgcaaagtggtgctggcgaccaatattgctgaaaccagtttaaccattgaaggtattcgtctggtggtggattgtgcccaggagcgtgtggcgcgttttgatccgcgcacggggcttacgcgactgattactcaacgcgttagccaggcatccatgacgcagcgtgccgggcgcgccgggcgtctggagccgggtatctgcctgcatttaatcgccaaagaacaagccgaacgcgccgcggcgcaaagtgaaccggaaatattacaaagcgatctttccggtttgctgatggaattactgcaatggggatgcagcgatccggcgcagatgagctggctggatcaaccgccagcagtgaatttacaggccgcgaaacgcctgttacggatgctgggggcactggacggtgaacggcttagtgtgcacgggcaaaaaatggcggcgctgggtaacgatccgcgtttagcggcaatgctggttagcgcgaagagcgacgacgaagctgctaccgcggcaaaaattgccgctattctcgaagagccgccacggatgggcaatagtgacctgggcgtggcgttttcgcgcaatcaaccagcctggcagcaacgtagtcagcaactgttaaaacgtttaaacgtacgcggcggtgaggcagacagttctcttatcgcgccgctacttgccggggcgtatgccgatcgcattgctcgtcgccgtgggcaagatggacgctatcaactggcaaacggcatgggggcgatgctcgatgccgacgatgcgctaagccgccacgaatggttgatcgcaccgttattattgcagggcagcgcctcgccggatgcgcggattttactggcgctgccggtcgatattgatgagttagtacaacgctgcccgcagctggtacagcagtctgacaccgtggaatgggatgacgcgcaaggtacgctgaaagcctggcgtcggctgcaaatcggtcagttgacggtgaaagtgcagccactggcgaaaccgtcagaagacgagttgcatcaggcgatgcttaacggcattcgtgataaaggtttaagcgtgctcaactggacggcggaagcggaacagctacgcttgcgtttgttatgcgccgcaaagtggttgccggaatatgactggccagcggttgatgatgagagtttgttggcgacgctggaaacgtggctactgccgcatatgagcggcgtgcattcactacgcggcctgaaatcactcgacatttatcaggcactacgcggattacttgattggggaatgcagcaacgtctggatagtgaattgcctgcgcattacactgtgccgacgggaagccggatcgccattcgttatcatgaagataatccgcccgcgctggcggtgagaatgcaggagatgtttggtgaggccaccaatccgacgatcgcccaggggcgcgtgccgctggtgctggagttgctttcccctgcccaaaggccgctgcaaatcacgcgtgatttgagcgccttctggaaaggagcgtaccgtgaggtgcaaaaagagatgaaagggcgttatcccaaacaggtctggccggacgacccggcaaacacagcaccaacgcgacgaacgaaaaagtattcg

SEQ ID NO: 605 - DNA, 2532 bp, Escherichia coli
atggccgggaatgaccgcgagccaattggacgcaaagagaaaccgacgcgtccggtcaaacaaaaggtaagccgtcgtcgttacgaagatgacgatgattacgacgattatgatgactatgaggatgaagaaccgatgccgcgcaaaggtaagggcaaaggcaaagggcgtaagcctcgtggcaaacgcggctggctatggctgctgctaaaactggctatcgtttttgccgtgctgatcgccatttacggcgtttatctcgatcaaaaaattcgcagccgtattgatggcaaggtctggcaattgcccgcggcagtttatggccggatggtcaaccttgagccagacatgaccatcagcaagaacgagatggtgaagctgctggaggcgacccagtatcgtcaggtgtcgaaaatgacccgtcctggcgaatttaccgtgcaggccaacagcattgagatgatccgccgtccgtttgatttcccggacagcaaagaagggcaggtgcgcgcgcgtctgacctttgatggcgatcatctggcaacgatcgtcaatatggagaacaaccgtcagttcggtttcttccgtcttgatccgcgtctgatcaccatgatctcttcgccaaacggtgagcagcgtctgtttgtgccgcgcagtggtttccctgatttgctggtggatactttgctggcgacagaagaccgtcatttctacgagcatgatgggatcagtctctactccatcggacgtgcggtgctggcaaacctgacagccggacgcacggtgcagggtgcgagtacgctgacgcaacagctggtgaaaaacctgttcctctccagcgagcgctcttactggcgtaaagcgaacgaagcttacatggcgctgatcatggacgcgcgttacagcaaagaccgtattcttgagctgtatatgaacgaggtgtatctcggtcagagcggcgacaacgaaatccgcggcttcccgctggcaagcttgtattactttggtcgcccggtagaagagctaagcctcgaccagcaggcgctgttagtcggtatggtgaaaggggcgtccatctacaacccgtggcgtaacccgaaactggcgctggagcgacgtaatctggtgctgcgtctgctgcaacagcaacagattattgatcaagaactctatgacatgttgagtgcacgtccgctgggtgttcagccgcgcggtggggtgatctctcctcagccagcctttatgcagctggtgcgtcaggagttgcaggcaaaactgggcgataaggtaaaagatctctccggcgtgaagatcttcactacctttgactcggtggcccaggacgcggcagaaaaagccgccgtggaaggcattccggcactgaagaaacagcgtaagttgagcgatcttgaaactgcgattgtggtcgtcgaccgctttagtggtgaagttcgtgcgatggtcggtggttctgagccgcagtttgcgggctacaaccgtgcgatgcaggcgcgtcgttcgattggttcccttgcaaaaccagcgacttatctgacggctttaagccagccgaaaatctatcgcctgaacacgtggattgccgatgcgccaatcgcgctgcgtcagccgaatggccaggtctggtcaccgcagaatgatgaccgtcgttatagcgaaagtggcagagtgatgctggtggatgcgttgacccgttcgatgaacgtgccgacggtgaatctggggatggcgctggggctgcctgcggttacggagacctggatcaaactgggcgtaccgaaagatcagctgcatccggttccggcaatgctgctgggggcgttgaacttaacgccaatcgaagtggcgcaggcattccagaccatcgccagcggtggtaaccgtgcaccgctttctgcgctgcgttcggtaatcgcggaagatggcaaagtgctgtatcagagcttcccgcaggcggaacgcgctgttccggcgcaggcggcgtatctgacactatggaccatgcagcaggttgtacaacgcggtacgggtcgtcagcttggggcgaaatacccgaacctgcatctggcagggaaaacagggactaccaacaataacgtagatacctggtttgcgggcattgacggcagcacggtgaccatcacctgggtaggccgtgataacaaccagccgaccaaactgtatggagccagcggggcaatgtcgatttatcagcgttatctggctaaccagacgccaacaccgctgaatcttgttccgccagaagatattgcagatatgggcgtggactacgacggcaactttgtttgcagcggtggcatgcgtgtcttgccggtctggaccagcgatccgcaatcgctgtgccagcagagtgagatgcagcagcagccgtcaggcaatccgtttgatcagtcttcacagccgcagcaacagccgcaacagcaacctgctcagcaagagcagaaagacagcgacggtgtagccggttggattaaagatatgtttggtagtaat

SEQ ID NO: 606 - DNA, 795 bp, Escherichia coli
atgcaggaatacacgaatcattccgataccacttttgcactgcgtaatatctcctttcgtgtgccagggcgcacgcttttgcatccgctgtcgttaacctttcctgccgggaaagtgactggtctgattggtcacaacggttctggtaaatccactctgctcaaaatgcttggccgtcatcagccaccgtcggaaggcgaaattcttcttgatgcccagccgctggaaagctggagcagcaaagcgtttgcccgcaaagtggcttatttaccgcagcagcttcctccggcagaagggatgaccgtgcgtgaactggtggcgattggtcgttacccgtggcatggcgcgctggggcgctttggggcggcagatcgcgaaaaagtcgaggaagctatctcgctggttggcttaaaaccgctggcgcatcggctggttgatagtctctctggcggcgaacgtcagcgggcgtggatcgccatgctggtggcgcaggatagccgttgtctgttgctcgacgaaccgacctcggcgctggatatcgcccaccaggttgatgtgctggcgctggtgcaccgtttaagtcaggagcgtggcctgacggtcattgccgtgttgcacgatatcaatatggcggcgcgctactgtgattatctggtcgccctgcgcggtggtgaaatgattgctcagggaacgcctgcggaaattatgcgcggcgaaaccctcgaaatgatttatggcatcccgatgggtattctgccgcatccggcgggtgctgcacctgtgagttttgtttat

SEQ ID NO: 607 - DNA, 888 bp, Escherichia coli
atgagcggcttacctcttatttcgcgccgtcgactgttaacggcgatggcgctttctccgttgttatggcagatgaataccgcccacgcggcggttattgatcccaatcgtattgtggcgctggagtggttgccggtggaattactgctggcgctcggcatcgtgccttacggcgtggcggacaccatcaactatcgcctgtgggtcagcgaaccgccattgccggactcagtgattgacgttggtttgcgtacagaacccaaccttgaactgctgaccgaaatgaaaccatcgtttatggtctggtcggcaggatatggcccttcaccagaaatgctggcacgtattgcgccggggcgtggatttaacttcagcgacggcaaacagccgctggcgatggcgcgtaaatcactgacggaaatggcagatttacttaacctgcaaagcgcagcagaaacgcatttagcgcactatgaagactttatccgcagcatgaaaccccgctttgtgaagcgtggtgcgcgcccgttattgctgacgacacttatcgatccgcgccatatgctggtcttcggtccaaacagcttgttccaggaaattcttgatgagtacggcatcccaaatgcctggcaaggggaaaccaacttctggggcagtaccgccgtcagtatcgatcgtctggcagcgtataaagacgttgatgtgctctgttttgatcacgacaacagcaaagacatggatgcgctaatggcaaccccgctgtggcaggccatgccgtttgtccgtgcaggacgttttcagcgcgttccggcggtctggttctatggcgcgacgctttcggcaatgcactttgtgcgtattctggataacgccatcggaggtaaagcg

SEQ ID NO: 608 - DNA, 555 bp, Escherichia coli
gtgattagcgatatcagaaaagatgctgaagtacgcatggacaaatgcgtagaagcgttcaaaacccaaatcagcaaaatacgcacgggtcgtgcttctcccagcctgctggatggcattgtcgtggaatattacggcacgccgacgccgctgcgtcagctggcaagcgtaacggtagaagattcccgtactctgaaaatcaacgtgtttgatcgttcaatgtctccggccgttgaaaaagcgattatggcgtccgatcttggcctgaacccgaactctgcgggtagcgacatccgtgttccgctgccgccgctgacggaagaacgtcgtaaagatctgaccaaaatcgttcgtggtgaagcagaacaagcgcgtgttgcagtacgtaacgtgcgtcgtgacgcgaacgacaaagtgaaagcactgttgaaagataaagagatcagcgaagacgacgatcgccgttctcaggacgatgtacagaaactgactgatgctgcaatcaagaaaattgaagcggcgctggcagacaaagaagcagaactgatgcagttc

SEQ ID NO: 609 - DNA, 3525 bp, Escherichia coli
gtgttcagatttccgacatcccgactgttcagcacgctgagatctgctctcaggccagcgatgccgcgattcagggtatccgccgcctggctgctggcgctggcatggatttttctgctggtgtggatctggtggcaaggtccgaaatggacgctctatgagcagcactggctggctcctctaacaaaccgctggctggcgaccgccgtctgggggcttatcgctctgatctggctcacctggcgggtaatgaagcgtctgcaaaagctggaaaaacagcagaaacagcagcgggaggaagaaaaagatccgttgaccgtggaactccaccgccagcagcaatatctggatcactggctgctgcgcctgcgccgccatctggataaccgccgttatctgtggcagttgccgtggtatatggtcattggtcctgcgggtagcggtaaaagcgctctgctgcgcgagggctttccatctgacattatttacacgccggaaagcatccggggtacggaataccatccgctgatcacaccgcgagtgggcaaccaagcggtgattttcgatgttgacggcgtactgacctcgcccggcggggatgatctgctccaccgccgcctgcgcgaacactggctgggctggctgatgcaaacgcgcgcgcgccagccgctcaacggcctgatcctgacgctcgatcttcccgatctgctgacggcggataaatcccgccgtgagacactggtacaaaatttgcgccagcaacttcaggagatccgccagagtctgcactgccgtctgcccgtttacgtggtgctgacacggctggatctgctgaccggctttgccgcgctgttccattcactggataaaaaagaccgcgatgcgatcctcggcgtcacgtttacccgccgcgcccatgaaagtgacgactggcgcagcgaactgggggctttctggcagacgtgggtacaacaggtgaacctggcgctgtcggatctgatgctcgcacaaaccggtgctgctccccgcagcgccgtgttcagcttctcccgtcagatgcagggaacaggagaaatcgtcaccgcactgctcgccgcattgctggacggtgagaacatggatgtaatgctgcgtggcgtctggctcacatcatcgctacagcgtggccaggtggatgatattttcacgcagtccgccgcccgccagtacgggctgggtaacagctcgctggcaacctggcctctggtggagacgacgccgtattttactcgccgcctcttccctgaagtcctgctggctgagccgaacctggcgggtgaaaacagcgtctggctgaacagctcccggcgcaggctgaccgccttttccgcctgtggcgcggcgctggcggcattgctggtcggaagctggcaccattattacaatcagaactggcagtccggcgttaacgtactggcacaggctaaagcctttatggacgtaccaccaccgcaaggaacggatgaattcggcaatctgcaactgtcgttgcttaatccggtacgcgatgccaccctggcctatggcgattaccgcgatcgcggttttctggcggatatgggattgtaccagggcgtccgcgtagggccgtatgtggagcaaacctacattcagcttcttgagcagcgttatctcccctcgttaatgaacggcctgatccgggatctaaacaatgccccgccagagagcgaagaaaagctcgccgtgctgcgcgtactgcgcatgatggaagacaaaagtgggcgcaacaacgaggcggtaaaacagtacatggcgcggcgctggagcaatgaatttcacggccagcgcgatattcaggcgcaactgatggcgcatctggactatgcgctggagcacaccgactggcacgcgcagcgccagagcggtgacagcgatgctgtcagccgctggaccccctatgataaaccggtcattaatgcgcagcaggaactgagcaagctgcccatataccagcgtgtctaccagaccctgcgcaccaaagcattaagcgtgttgcccgccgatttgaatttgcgcgaccaggttggtcccaccttcgacaacgtgttcgtcgccggtaatgatgaaaaactggtgatcccgcagttcctcacccgctatggactgcaaagctattttgtcaaacagcgtgagggcctcgttgagctgaccgcgctggattcgtgggtactgaacctgacgcaaagcgtcgcctacagcgaggccgaccgtgaagagatccagcgccatatcaccgaacagtacatcagtgactataccgccacctggcgtgccggaatggataacctcaacgtccgtgactatgaggccatgtcggcgctgaccgacgcgctggagcagattatcagcggcgatcagccattccagcgtgcgctgacggcgctgcgcgataatacccacgcgctgacgctctccggcaaactggatgataaggcgagggaagcggcaataaatgagatggattaccgcctgttatcccggctggggcatgagttcgcaccggaaaacagcgcactggaggagcaaaaggacaaggcgagtacgctacaggccgtgtaccagcaactgaccgagctgcaccgttacctgctggcgatccagaactcgccagtgccggggaaatcggcgctgaaagcagtacagctacgtctggatcaaaacagcagcgatccaatcttcgctacccgccagatggcaaaaactctccctgcaccgcttaaccgctgggtaggtaagctcgcggatcaggcctggcatgtggtgatggtggaagccgttcgttacatggaagtggactggcgcgacaatgtagtgaaacccttcaacgagcagcttgccgataactatccgtttaatccgcgcgccacacaggatgcctcactggattcgtttgaacgtttctttaaaccggatggcattctggacaatttctacaagaacaacctgcgcctgttccttgaaaacgatctgacctttggcgacgacggcagagtgttaatccgtgaagatatccggcagcaactggataccgcgcagaaaatccgcgacatcttcttcagccagcagaacgggctgggcgcacagtttgccgtggaaaccgtatcgctttccggcaataagcggcgcagcgtacttaacctggacggccagttagtggactacagccagggacgcaactacaccgcccatctggtctggccgaacaacatgcgtgaaggcaatgaaagcaagctgacgctgattggcaccagcggcagagcaccgcacagtatcgcgttcagtggaccgtgggcgcagttccgcctgttcggcgcgggccagttgaccaatgtgaccagtgacacctttaacgtgcgctttaacgtggacggcggcgcaatggtttaccgggtgcatgtggataccgaagataacccgttcaccggcggtctgttcagcctgttccgtttaccggatacgttgtat

SEQ ID NO: 610 - DNA, 2196 bp, Escherichia coli
atgaaatttgataaacccgcaggggaaaacccgatcgatcagctgaaggttgtcggtcgtccccatgaccgcatcgacggaccgctgaaaactaccggcacggcacgctacgcctacgaatggtatgaagaagctcccaacgccgcctatggctatatcgtcggttccgccattgccaaaggacgcctcaccgccctcgatacggacgccgcgcaaaaagcgccgggcgtactggctgtcattaccgccagtaacgccggggcactcggcaaaggcgacaaaaacaccgccagcctgttaggcggccccactattgagcactatcatcaggccattgcgctggtagtggctgagaccttcgaacaggcgcgagcggcggcctcgctggtgcaggcgcactatcgccgtaataaaggagcttactccctggcggacgaaaaacaggccgtcagtcagccgccggaagacacgcccgataaaaacgttggtgactttgacggggctttcacctccgctgcggtaaagattggtgctacctacacgaccccggaccagagccatatggcgatggagccgcatgcctcgatggccgtctgggatgggaataagcttaccctctggacctcaaatcagatgattgactggtgccgcaccgatctggcaaaaacgctgaaagtgcccgtggagaatgtgcgtattatctccccgtatatcggcggagggtttggcggcaagctgttcctgagaagcgatgcgctgctggcggccctcgccgcccgtgcggtgaaacgtccggttaaagtgatgctcccccgccccactattcccaataacaccacgcaccgccccgccacccttcagcacttgcgtatcggtactgaccagagcgggaaaatcaccgctatctcacatgaaagctggtccggaaacctgcccggtggcacgccggaaacggcggtacagcaaagcgaattactctacgcaggggcaaaccgtcatacaggcctgcggctcgccacgcttgatttgccggaagggaacgccatgcgtgcgcccggcgaagcccccggtctgatggcgctcgaaatcgcgatcgacgaactggcggaaaaagcgggcatcgatcccgtcgagtttcgcatcctgaatgacactcaggttgaccccgccgacccgacgcgccgcttctctcgccgtcagcttatcgagtgcttgcgcaccggagcggataaatttggctggaagcagcgcaacgccacacccggacaggtacgcgacggggagtggctagtcggccacggtgttgcggcgggctttcgcaataatctgctggaaaaatcgggtgcgcgggttcacctggagcaaaacggcaccgttaccgtggaaacggacatgaccgatattggcactggcagctacaccattctggcccagacggcagcggaaatgcttggcgtaccgctggagcaggttgcggttcacctcggcgattccagtttcccggtttctgcgggttctggtggacaatggggcgcgaatacctccacctccggcgtttacgccgcctgtgtgaagcttcgcgaaatgattgcctcggcagtcgggtttgatcctgagcagtcgcagtttgccgacggtaagattaccaacggtacccgaagcgccatgctacatggggccaccgcaggcggcagactgacagcggaagagagcattgaattcggaacactgagcaaggagtaccagcagtcgacctttgccgggcattttgtggaggtcggcgtgcatagcgcgacgggagaagttcgggtccggcgtatgctcgctgtgtgtgctgcaggacgcatcctgaatccgaaaactgcacgcagccaggtcattggcgcgatgactatgggcatgggcgcggcactgatggaggagctggcggtagatgaccgtttgggctacttcgttaatcacgatatggcggggtatgaggtgccggttcatgcggatatcccaaaacaggaggtgattttcctggatgataccgaccccatctcctccccgatgaaggccaaaggtgtcggtgagctgggcctgtgcggcgtgagcgcggctatcgccaacgcggtgtataacgccaccggtattcgggtacgggattatcccatcactctggataagctgctcgataagctgccggatgtggtt

SEQ ID NO: 611 - DNA, 954 bp, Escherichia coli
atgaaggcgtttacctatgaacgtgtgaacaccccggccgaggcggcacttagcgctcagcgcgtacctggcgcaaaatttatcgctggcgggaccaatctgctggacctgatgaagctggaaattgaaacgccaacccaccttatcgatgtgaacgggctcgggctcgataagattgaagtaaccgacgcgggtgggctgcgcatcggcgcactggtacggaacaccgacctggcagctcacgagcgcgtgcgtcgtgattacgcggtactctcccgcgccctgctcgctggcgcgtctggtcagttacgtaatcaggcaaccaccgcaggtaatctgctccagcgcacgcgctgcccctatttttacgacaccaatcagccctgcaataagcgcctgcccgggagcggctgcgcggcacttgaaggctttagccgtcagcacgcggtggtaggcgtaagcgaagcctgcattgccacccatccgagcgatatggcggtcgcaatgcggttgctggatgcggtggtggaaaccatcacgccggagggaaagactcgcagtatcacactggctgatttttatcaccctccgggaaaaacgccgcacattgaaaccgacctgcttcccggtgagcttatcgttgcggtgacgttacctccgccgctcggcggaaaacatatttaccgtaaggtgcgcgatcgcgcctcctacgcctttgccctggtatcggtcgcagcgattattcagcctgacggcagcgggcgcgtcgcgctgggcggagtagcacataagccctggcgcattgaggctgcggatgctcagctatcccagggggcgcaggccgtatatgacgcgctgttcgccagcgcccatcccaccgctgaaaacacctttaaactcctgttggcgaagcgaacgcttgcctccgtactggctgaagcgagggcacaggca

SEQ ID NO: 612 - DNA, 1641 bp, Escherichia coli
atgagagttaacctactgatagcgatgataatctttgcgctaatctggcctgcaaccgcgctcagagcggcagtgagcaaaacaacctgggcggatgctccggcacgcgagtttgtgtttgtcgaaaacaactcagacgacaactttttcgtcacgcctggcggggcgctggatccgcgcctgaccggtgccaaccgctggaccggtttaaaatacaatggttcaggaaccatctatcagcaaagcctcggctacattgataacggttacaacaccggcctttataccaactggaagtttgatatgtggctggaaaattcaccagtttcatctcctttaactggcttgcgctgcatcaactggtacgcagggtgtaatatgaccaccagtcttatcctgccgcaaaccaccgacgccagtggattttatggcgcgacggtgaccagcggcggcgcgaagtggatgcacggcatgttgtcagacgcgttttaccagtatctgcaacaaatgcccgtcggcagcagctttacaatgaccatcaatgcctgccagacctctgtgaactatgacgccagcagcggcgcacgctgtaaggatcaggcctccggcaactggtatgttcgcaacgtcacccatacgaaagcagcaaatctacggttgataaatacccactcgctggcggaagtatttatcaacagcgacggagtaccgactctgggcgaagggaacgccgactgccggacgcaaaccatcggcagccgttcaggattaagttgtaagatggttaactataccctgcaaacaaacggactcagcaacacctcaatccatatattcccggcgatcgccaactcgtcgttagcctcggccgtcggggcgtacgatatgcagttcagtctgaatggcagttcatggaaaccggtgagcaatactgcctattactacaccttcaacgagatgaagagcgcagactcgatctatgttttcttctcgagcaacttctttaagcagatggtgaacctcgggatcagcgatatcaacaccaaagatctattcaactttcgctttcagaacaccacatcaccggagtctggctggtatgaattttctacctccaacacgctgattatcaaaccccgtgatttcagcatcagtattatctccgatgaatatactcagacaccgtcgcgggagggatatgttggtagcggcgagtcggcactcgatttcggttatatcgtaaccaccagcggtaaaacagctgccgacgaagtgctgatcaaggtgaccggacccgcgcaggtgattggcgggcgctcctattgtgtcttcagctccgatgacggtaaggcgaaagtaccgttcccggcgacactttcctttattgcccgcaacggagctacaaaaacctacgatgccgggtgcgatgatagctggcgggatatgaccgatgcgctgtggctgactacaccgtggactgatatctctggcgaagtggggcagatggataagactactgtcaaattttcgattccaatggataacgccatttcgctgcgtacggtagatgataacggctggtttggcgaagtcagcgcttcaggagaaattcatgttcaggcgacgtggcgtaacattaac

SEQ ID NO: 613 - DNA, 714 bp, Escherichia coli
atgtaccagcaggggtacccccctgctttattcctggacggaattgttatgaaaaagcaccttctgcctctcactctgctgttttccggaatatctccggcccaggcgctggatgtcggcgatatatcatcgtttatgaacagtgacagcagcacgctgagcaaaacgatccaaaacagtaccgacagtggccgcctcatcaatatccgtctcgaacggctctcttcaccgcttgacgacgggcaggttatcgcaatggacaagccggatgagttgctactcactcccgccagcttgctgctacccgcccaagccagcgaagtgatccgcttcttctataagggaccagtagatgagaaagagcgctattaccgcattgtctggttcgatcaggccctcagtgatgcgcagcgcgagaatgccaaccgcagcgctgtggccactgcttccgcccgcatcggcaccattctggtcgtcgccccccgccaggcgaactaccgctttcagtacgccaacggctccctgacaaatacaggaaatgcgacgctgcggatcctcgcctatggcccctgcctgaaagccgccaatggtaaggagtgtaaagagaattactacctgatgccgggcaagtcgcgtcgttttacccgcgtggacacggcggataacaaaggacgggttgcactttggcagggtgataagttcattcccgtgaaa

SEQ ID NO: 614 - DNA, 3483 bp, Escherichia coli
atgtatgaacagtattatggcgatgaagtcgggctgtttggtaaagataaacgccagaaagatccacatgcgattaccgctgaagtgaattacacgccagtgcctcttctgaccctgagtgccgggcataagcagggcaagagtggtgagaatgacactcgctttggcctggaagttaattatcggattggcgaacctctggaaaaacaactcgatacagacagcattcgcgagcgtcgaatgctggcaggcagccgctatgacctggttgagcgtaataacaatatcgttcttgagtatcgcaaatctgaagtgatccgtattgctctgcctgagcggattgaaggtaagggcggtcagacactttccctgggacttgtggtcagcaaagcaactcacggactgaaaaatgtgcagtgggaagcgccgtcattactggctgaaggtggcaaaattaccggtcagggtagtcagtggcaagtaacgctcccggcttatcgtccaggcaaagacaattattatgcggtttcagcgattgcctacgataacaaaggcaatgcctcgaaacgtgtgcagacagaagtggttattagcggagctggtatgagcgccgatcgtacggcgttaacgcttgacggtcagagccgtattcaaatgcttgctaacggtaatgagcaaaagccgctggtgctgtctctgcgcgacgccgagggccagccagtcacgggcatgaaagatcagatcaagactgaactaaccttcaaaccggctggaaatattgtgactcgtaccctgaaggccactaaatcacaggcaaagccaacactgggtgagttcaccgaaactgaagcaggggtgtatcagtctgtctttactaccggcacgcagtcaggtgaggcaacgattactgttagcgttgatggcatgagcaaaaccgtcactgcagaactgcgggccacgatgatggatgtggcaaactccaccctgagcgctaacgagccatcaggtgacgtggttgctgatggtcagcaagcctacacgctgacactgacagcggtggactccgagggtaatccggtgacgggagaagccagccgcctgcgacttgttccgcaagacactaatggtgtaaccgttggtgccatttcggaaataaaaccaggggtttacagcgccacggtttcttcgacccgtgccggaaacgttgttgtgcgtgccttcagcgagcagtatcagctgggcacattacaacaaacgctgaagtttgttgccgggccgcttgatgcagcacattcgtccatcaccctgaatccggataaaccggtggtcggcggtacagttacggcaatctggacggcaaaagatgccaatgacaaccctgtaacaggcctcaatccggatgcaccgtcattatcgggcgcagcagctgctggttctacggcatctggctggacaaataatggtgatgggacgtggactgcgcagattactctcggctctacggcgggtgaattagaagttatgccgaagctaaatggacaggatgcggcagcaaatgcggcaaaagtaaccgtggtggctgatgcattatcttcaaaccagtcgaaagtctctgtcgcagaagatcacgtaaaagccggtgaaagcacaaccgtaacgcttattgcaaaagatgcgcatggcaacgctatcagtggtctttcgttgtcggcaagtttgacggggaccgcctctgaaggggcgaccatttccagttggaccgaaaaaggtgacggttcctatgttgctacgttgaccacaggcggaaagacgggcgagcttcgtgtcatgcctctcttcaacggccagccagcagccaccgaagccgcgcagttgacggtcatcgccggagagatgtcatcagcgaactctacgcttgttgcggacaataagactccaacggttaaaacgacgacggaactcaccttcaccgtgaaggatgcgtacgggaacccggtcaccgggctgaagccagatgcaccagtgtttagcggtgccgccagcacgggatcagcgcgaccttcagcaggaagctggacagagcaaagtaatggggtctacgtggcgaccttaacgctgggatcggctgcaggtcagttgtctgtgatgccgcgagtgaacggccaaaatgccgttgctcagccactggtgctgaatgttgcaggcgacgcttcccgggcagtgatcagtgatatggcggtgaaggtgaataaccaactggcaaatggacagtctgctaaccaggtaaccctgaccgtcgtggacagctatggtaacccgttgcaggggcaagaagttacgctgactttaccgcagggtgtgactagcaagacggggaatacagtaacaaccaatgcggcaggtaaggcggatattgagttgatatcaaccgttgcaggggaacttgaaatcgcggccgcggtgaaaaactctcagaagacggtcacggtgaaattcaacgcggatgccagcaccggtcaggcaaacctgcaggtagacaccgccgttcaaaaagtggcaaacggcaaagatgcctttacgctgacggcgaccgttgaggataaaaacggtaaccctgttccaggcactctggtgacctttaatctgccccggggtgtcaagccgcttactggcgataatgtctgggtgaaagccaacgatgaggggaaagcagagttgcaggtggtttccgtgactgccggaacctatgagatcacggcgtcggcaggaaatgaccagccttcagatgcgcagactataacgtttgtagccgataaggctaccgcaaccgtctccggtattgaggtgattggcaactatgcactggcggacggcaaagccaaacagacgtataaagttacggtgactgatgccaataacaacctgttgaaagatagcgacgtgacgctgactgccagcccggcttcgttaaacctggaaccgaatggcactgcgacaacgaatgagcaagggcaggctattttcaccgctaccactactgttgcggcgacatacacactcaaggcgcaagtgagtcagaccaacggtcaggtatcaacgaaaactgccgaatctaaattcgtcgcggatgataaaaacgcggagctcaccgcatcatctgatgtgcaatcgctggtggcggatgggaaatcgactgcgaagctggaggttaccctgttctcggcaaataaccctgttggggggaatgtgtgggtcgacattgaggctccggaaggagtgacggagaaggattatcaattcctgccgtcgaaaaatgaccatttcgtgagcggaaaaatcacgcgtacatttagtaccagcaagcctggtgtctatacgttcacatttaacgccctgacctatggcgggtacgaaatgaagccagtgacggtgaccataaccgcggtggatgccgatacggcaaagggcgaggaggcgatgaag

SEQ ID NO: 615 - DNA, 1533 bp, Escherichia coli
atgagcgatttttggtattcttttcccatgaggttatgtacaacctgctccaggataaccctgtattggagcaaagatatgacaatttcaaattcgaatttattgaaaccgtttattactggtactgagttgccgccttttaaagaggatgtcttttctaaaacagaagaacaatttaaaaaaagcccccatggcaaattgcttttcatttccggaaatgaaaacttagtaaacatttcagcggaaaaaatcgatgaaataaaaaatagcaaagatttcttttcaaatattgtaaatataataattttactcattaagcatcctgaaaaaattctgcccattcttcatggttgtcctgtagagtccatcgaactcattaagaatgcgaaacgaacggggcaatggtcatatgagatgactgataagaacgggcagagtattgaagtgtcctatattttcactgataccatagataataattatgatggaaaattatgcttaaaaatctgtaactcctgcaaccaaaatgattctagtacacatgaatataaaatagatcatcaacagttgaaaaatcacataaggcaacttgaggagtgggcccttcttgaaaagttttatgatagcaacgcttattattctaaacgtacaaaacaattagagaagaaaattgccgatgcggggtttatagcagggaaggttaatgccgataactttaatgtaaaagagtttagagccgatatagcctcgatgctttgtgaacagccccccatgcgaacacaccagatttcttcatccggatacttatctgccgataaagtgcccgatctctataagacaaatttgaaagacgcgcagagagatctgaaaacaacaccggttgacatcgatggtgttagtctaaaatcaaaaactcgggaaaaaattgcgaaaaaaactgaggaagaaaatgcgaaaaaaacagcggaaataattgcgaaacaaaatgcgaagaccattgaggagaagaatagtgaaaaaaacaagaaagaatcaaatcctgaggataattttgtcttaaaattctcaccggaagaaatcaatgagatgctcctggattacagcgatgaagaacaaaaaaaattaagaccttttttcactagtgatcacatctattgtttgtttgatgcttttagtcaggatttgcataatgttgctcgtaatggcagtccacggtatgcaggtttactacgtcaaatagcatccaagactgcgaaattacaagatattgatcaactattgttctggcgcacgttttcaggaggggtcttccatcgacgtatctctgtgaacagcgagccagaaaagacagatgtatggcgattcagtagccaatttgattttccacatataaatgaaaacggagagttatccagaacggtactcatgttcgagggggttgctgaaagcaactttaaagatatcgccaatcattccagcgaatgttttacttacagttgttatgccgccccgctggatgcgaatgctaaaaaa

SEQ ID NO: 616 - DNA, 1815 bp, Escherichia coli
atgatgttaaatgcatggcacctgccggtgcccccatttgttaaacaaagcaaagatcaactgctcattacactgtggctgacgggcgaagacccaccgcagcgcattatgctgcgtacagaacacgacaacgaagaaacgtcagtaccgatgcataagcagcgcagtcagccgcagcttggcgtcaccgcatggcgggcggcgatcgatctctccagcgggcaacctcggcggcgttatagtttcaaattgctgtggcacgatcgccagcgttggtttacaccgcagggcttcagccgaatgccgccagcacgactggagcagtttgccgtcgatgtaccggatatcggcccacaatgggctgcggatcagattttttatcagatcttccctgatcgtttcgcccgtagtcttcctcgtgaagctgaacaggatcatgtttattaccatcacgcagccggacaagagatcatattgcgtgactgggatgaaccggtcacggcgcaggcgggcggatcaacgttctatggcggcgatctggacggtatcagcgaaaaactgccgtatctgaaaaaacttggcgtgacggcgctgtatcttaatccggtgtttaaagctcccagcgtacataaatacgataccgaggattatcgccatgtcgatccgcagtttggcggtgatggggcgttgctgcgcttacgccacaatacgcagcagctgggaatgcggctggtgctggatggcgtgtttaaccacagtggcgattcccatgcctggtttgacaggcacaatcgtggcacggggggagcttgtcacaaccccgaatcgccctggcgcgactggtactcgtttagtgatgatggcacggcgctcgactggcttggctatgccagcttgccgaagctggattatcagtcggaaagtctggtgaatgaaatttatcgcggggaagacagtattgtccgccactggctgaaagcgccgtggagtatggacggctggcggctggatgtggtgcatatgctgggggaggcgggtggggcgcgcaataatatgcagcacgttgctgggatcaccgaagcggcgaaagaaacacagccggaagcgtatattgtcggcgaacattttggcgatgcacggcaatggttacaggccgatgtggaagatgccgccatgaactatcgcggctttaccttcccgttgtggggatttctcgccaataccgatatctcttacgatccgcagcacattgacgcccaaacctgtatggcctggatggataattaccgcgcagggctttctcatcaacaacaattacgtatgtttaatcagctcgatagccacgatactgcgcgatttaaaacgctgctcggtcgggatattgcgcgcctgccgctggcggtggtctggctgttcacctggcctggtgtaccgtgcatttattacggtgatgaagtgggactggatggtaaaaacgatccgttttgccgtaaaccgttcccctggcaggtggaaaagcaggatacggcgttattcgcgctgtaccagcgaatgattgcgctgcgtaagaaaagtcaggcgctgcgtcgtggcggctgtcaggtgctgtatgcggaagataacgtggtggtatttgtccgcgtgctgaatcagcaacgtgtactggtggcaatcaaccgtggcgaggcctgtgaagtggtgctccccgcgtcaccgtttcttaatgtcgcgcaatggcaacgcaaagaaggccatgggcaactgacagacgggattctggctttgcctgccatttcggctacggtgtggatcaac

SEQ ID NO: 617 - DNA, 1533 bp, Escherichia coli; identical to SEQ ID NO: 615

SEQ ID NO: 618 - DNA, 7524 bp, Escherichia coli
gtggtcagcgttaacaccgtggcgggcgacgatattcttaataatgccgagcaggccgtcgcgcagatcatctccggacaagtcagcggtgcttctccaggcgatacggtaacggtgaaattgggcactcatgtcctgacgggcatcgtgctggcagatggcagctggaatgtggcactggacccggcggtaacccgcacgctggatcgcggagccaatacgattttcgtcaccgtgacagatgctgcaggaaataccggcgcggcgtctcgggcaatcacgctggtcggtgtttctccgttgatcaccattaacaccgtctccggcgatgacattatcagtggcgcagaaaaaggtgcgccactgacccttaccggtagcactcaacaggccgagacaggacaaaccgtcacagtaaccctggctggacagagttttaccactaccgtgcaggctgatggctcctggagtctgacggtacctgccgccgcgatgggaaatctgcctgacggcgcggtggcgattaccgcttctgtgacggatctcagcggcaataccggcaacacctcccgcaccattaccgtcgacagccaggccccggcgttgagcatcgatccactgaccgctgataacatcatcaacgccgccgaaagcgggcaggatctgcccatcaccggcaccaccgatgcccagccggggcagacggtaacggtgacgcttaacgggcagacgtatcagggcgtcgtgcagtcagacggcacctggagcgtgaccgttcccgccgccaacgtgggcgcactggctgacggcaacgctacggtcaccgccagcgtgaacgatgtcgccggtaacccgaccagcgtttcacgcgtggcgctggtggatgccacgcctccggtggtgaccattaatccggtggcgaccgataacgtcatcaacacgccggaacacacccaggcgcaaatcatcagtggcacggttactggcgcgcaggcgggcgatattgtcaccgttacgttaaataattccgattacaccacggtggtggatggttccggcaactggagtctgggtgttccggcttccgttgtcagcggactggtggacggcagttatcctgtcagcgtctcggtaaccgaccgcgcaggaaacagcggcagccagtcattgaccgtcacggtcaataccgcagcgccccttatcggcattaacagcattgcgggcgatgatgtgattaacgccagcgaaaaaggaaccgatgtccagattaccggcaccagcgatcagcctgttaataccgccatcaccgtgacgctgaacgggcaaaattacaccaccacgaccgacgcctccggcaactggagcgtcaccgttccggcatcggcggtaaccgcactgggccaggccaactacacggtaacggcggcggtaaccagcagtatcggcaacagcaacaccgccagccataacgtgctggttgacagcgcgctgcccggcgtgaccattaacccggtggcaaccgacgatattattaacgccgccgaagcgggcgtcgcgcaaaccatcagcgggcaggttactggagcggaagatggcgacacggtaactattacgttgggcggtaatacttatacggcgacggtgggcagcaatctcacctggagcgtgagcgttccggcggcagatattcaggcgctgggtaatggcgatttaacggtgagcgcctcggtcaccaatcaaaacggcaacaccggcagcggcacgcgggatatcaccatcgacgccaatctgcccggtctgcggatcgatacggtggcaggcgatgatgtggtcaatatcatcgagcacgggcaggcgctggtggtcagcggcagcagctcggggctggctgaaggcacgccgcttaccgtcacaattaataatgtggaatacaccactgcggtgcaggccgatggtagctggagcgtgggcgtcacggcggcgcaggttagcgcctggcctgcggggacgattaatattgccgtgtccggggaaagtagcgccggaaatccgataagcattacgcatccggtaacggtggatctcactccggcggctattaccatcaacactatcgccacggacgatgtgattaacggcgcagaaaaaggcgctgatttaacgctttccggcaccaccacaaatgtagaagccgggcaaacggtcaccgtcacctttggcgggaaaaattacactgccagcgtggcgagcgatggtagctggagtgccaccgttcccgctgccgatttagcgttattaaccgatggcagcgcctccgcgcaggccagcgtcagcaatattaatggcaatagcgcctcggcggtgcataactacagcgtcgatagcagtgccccgaccatcattatcaataccgttgccagcgacaatatcgtcaacgccagcgaagccgatgcgggtgtgacggtgagcggcagcaccaccgctgaagcggggcagattgttacggtaacgctcaatagcccgaccgtgcagacctatcaggcaacggtacaggccgacggcagctggagcattaatattccggcggcagatcttgaggcattgaccgatggcagccacaccctgaccgccacggtcaatgacaaagcgggcaacccggcgagcaccacgcataatctggcggtggatctcaccgttccggtacttaccatcaacaccattgcgggcgacgatattattaacgccgccgaacacgggcaggcgctggtgatttccggttccagcactggcggagaagcgggggatgtcgtcaccgtcacgctaaacagtaaaacctacaccacgacgctggatgcctccggcaactggagcgtcggcgttccggcggcggatgccacggcgctgggtagcggcccgcaaaccgtgatggcgaccgttaccgatgcggcaggtaatagcgacagcgaaacgcacacggtcaccgttaaccttaccgcgccaaccattggcattaacaccatcgctaccgatgacataattaacgccaccgaaaaaggcgcggatctgcaaatttccggcaccagtaatcagccagcaggcaccacaattacgctgacgctgaacgggcaaaattacactgcgacgacggacgccgcaggcaactggagcaccatagtgcctgcttccgcagtaggtgcgctgggcgaagccagctacacggtgacggcgaacgtcaccgacagcgcaggaaacagcaattccgccagccataatgtgcaggtcaataccgcgctgccgggtgtaaccattaatccggtggcgagcgacgatattatcaacgctgcggaatcgggcgtggcgcagaccatcagcgggcaggtgacgggtgcggcggcgggcgatacggttaccgtaacgcttggcgggaaaacctacactgctaccgtgcaggggaatttaagctggagcgtggacgttccggcggcggatattcaggccatcggtaatggcgagctgacggttaatgcctcggtaaccaacggtgttggcaatactggcagcggttcgcgcgatattgtgatagacgccaacctgccgggtctgcgcgtcgataccgtggcgggcgatgatgtggtcaacagcatcgagcacagtcaggcactggtgataactggtagcagcagcgggctggcggcgggcgcggcgctgacggtggtgattaacacggtcacttacgctgcgacggtattagccgatggtatatggagccttggcgttccagcggcagatgtgggcaactggcctgcgggtacggtgaatatcacggtttcaggtgccactagcgcaggaaacccggtcactatcacccatccggtcaccgtcgatctggcggcggtggcgatctccattaacaccgtttccggcgacgatgtgattaacgccgccgaaaaaggggcagatttaaccctttccggcagcacttccggcgtggaagcggggcaaaccgtcaccgtcacctttggcggtaaaacctacaccgccaccgtagcgggcgatggtagctggacaaccaccgtacccgccgccgatctcagcgcgttacgcgacggcgacgccacggtacaggccagcgtcagcaatattaacggcaacacggcttcggcgacccacgcctacagcgtcgatgccacggcaccgacgcttgccattaacaccatcgccactgacgatattctgaacgccgccgaggcgggcaatccgctaaccatcagcggcagtagcaccgccgaagcggggcagacggtaactgtcacgcttaatggcgtgacttacaccggcaccgtcctggcggacgggagctggagcgtcagcgtgccgacggcggatctcagcaatctgaccgccagccagtacacggtcagcgcctcggtaagcgataaagcgggtaaccctgcgaccgccactcacgggctggcggtggatctcaccgtgccggtgctgaccatcaacaccgtctccggcgatgacattattaacgccgccgaacacggacaggcgctggtgatctccggctccagcactggcggggaagcgggcgatgtcatcaccgtcacgttaaacagtaaaacctataccaccacgctggacgcttccggcaactggagcgtcggcgttccggcggcagatgtcactgcgctgggcagcggcccgcaaaccattactgccaccattacggatatcgcgggtaatagcgatgacgccagccgcacggtcaccgtaaatctcaccgtgccaaccattggcatcaacactatcgccagcgatgacgtgattaacgccacggaaaaaggcgcggatctgcaaattaccggcaccagtaatcaacccgcaggcaccacaataacggtgacgctgaacgggcaaaattacaccgcgacgaccgattcctccggcaactggagcgccacggtgccagcctcggcggttagcgcgctgggggaagccaactacacggtaaccgcgaacgtcaccgatagtgcaggcaacagcaattccgccagccataacgtgctggtcaacagcgcgctgcctgccgtcaccattaacgcggtggcgaccgacgatattattaacgctgctgaatccggaaacgcgcaaaccatcagcgggcaggtcacgggcgcggcggcgggcgatacggtcaccgttacgctgggcggcaacacctacaccgccacggtgcaggctaatttaagctggagtgtggacgttccggcggcggatattcaggcgctgggcaacggcgacctgacggttaacgcctcggtcaccaatagcgttggcaataccggcagcggttcgcgcgatatcacgatcgacgccaatctgcctggcctgcgggtcgataccgtggcgggcgatgatgttattaacagcattgaacacaatcaggcgctggtgatcaccgggagcagcagcggattaacggcgggaacggcgttaacggtcgagattaacaacgttacttacgccgcgacggtgttagccgacggcacatggaacctcggcgttccggcggcagacgtcagcaactggccagcgggtacggtcgatataaccgtaagcggcaccaacagcgccgggacaacctccactattacccatccggttaccgtcgatctggcggcggttgccatcaccattaacaccctttccggcgatgatgtgatcaacgccgtggagaaaggcgaaacgctggtggtgagcggcagcaccagcggtgtcgaagccgggcagacggtgacggtcacctttggtggcaaaaattacaccaccaccgttgaagccaacggtagctggacggtgaatgtgccgcctgccgatctcgctgcgctaccggacggcgcgggcaacgtgcaggcgagcgtcagcaatattaacggcaacaacgcccaggccgatcgcgcgtacagcgttgatgccaccgcgccgcttgtgaccatcaacactatcgccagcgacgatatccttaacgtgagcgaagcgggcgcggggataaccatcagcggtaccaccacggcacaggccggacagacgctgaccgtcacgctcaataacaacacgtaccagaccactgttctcgcggatggcacctggagcgtgaacgttccggcaacggatttaagcggattaaccgccagcagttacaccgtgaccgccacggtgagcgacaaagcgggcaacccggcaagcgccgatcatgcgctggcggtggacgttaccgctccggatctcaccattaacaccgtcgcgggcgatgacatcatcaacgccatcgaacacgggcaggcgctggtcgtcagcggcaccagcacgggcgcggcggcgggcgatgtggtcacggttaacctgaacggtaaaaactacaccaccacgctggacgcttccggtaactggagcgtcggcattccggcggtggatgtcacggcgctggcaacgggaagccagaccattaccgccagcctgagcgatcgcgcgggcaacagcgacagcactacccataatgtgaccgttgatctcagcggcccgacgctgaccatcagtaccgtctccgacgatgacattattaacagtacggagaaaacccaggatctgaccatcagcggcggctccagcggtctggcgactggcaccacggtcaccgtgatgttgaacggcctggcgtacagcgccactaccgatagttccggtaactggagcgttaccgtgcctgcttcggcggtcggcgcactgggcgaggcggtataccagattagcgccagtgccaccgacagcgcgggcaacagcggcagcaccacccatacggtgaatgtcgaatcgctcctgcctggggtgattattaataccgtggcgggcgatgacattatcaacgccgctgaaatcgttgtggcgcagaccatcagcggtcaggtcacgggaacggcggctgcggggaacacggtgacggtcactattggcggcaatcaatacaccgccaccgtgcagtcagatttaagctggagcgtcagcgtacctgcgaacgttttgcaggcgctgggcaacggtgaactgaccatcagcgcctcggtgactaatggcgtgggtaatactggcaccacaacacacgatatcgtgatagatgccaatctgccaggtctgcgcgtcgataccgtagcaggcgatgatgtggtcaatattatcgagcatggtcaggcgctggtggtcaccggtagcagtagcggactggcggcgggggcggcgttgacggtggttatcaatagcgtcacctacggcgcaacggtactcgccgatggcacctggagtgtcggtgttcctgcggcagatgtcacaaactggcctgcgggaacggtcaatattgccgtttctggcaccaataccgccggaaccacaaccagcattactcatccggtcacggtcgatctcgcggccgtggcgattaccattacaccctttccactgacgatg

SEQ ID NO: 619 - DNA, 2151 bp, Escherichia coli
atgaaaactgtaaagctgtctttactggctgtcgttgttgctaccgcggtaagtccatctgcgtttgcgggtgatactgttgaggcggcaacgacagaattaacggtaatccagccaggaatgtcgcaatcggaaattgatcagaaaattggtcgatttttagaaaggacagggaatagtgtagccgcacaaaattatctgattgcgcatgattaccagacaacgacgcctcaggaaaatacagctgcttctcccgtacagcccaccaatacgctgaacccgataaccaatcaagcgcagaccgaccgcgacaacgggcaggataccgccattcaggacgcgcagcacgccgccaactgggcttcactgaaagctgatgacgcgcagcacgccatcacggtggcgcagacggatattgatgccaatacagccgccatcaccgatacccgtaatgatgtctccgcagtgcagtcagacgtcaccaacataaaaggcgatgtcgcacatgcccagtcaacggctgaccatgccaacgctaacgccaacaccgctctgattaacggcgtcaaactttccggtgctgtgacagaaaacaaaaacaacatcgaacagaaccgcagcgatattgctgaccagcagaaactgttggcatcaaacgagcaaaaacagatcgtccgcgacaacgggcaggataccgccattcaggacgcacaacatgccgccaactgggcttcactgaaagctgatgacgcgcaacacgccatcacggtggcgcagacggatattgatgccaataaagccgccatcaccgacatccgtaatgatgtctccgcagtgcagtcagacgtcaccaacataaaaggcgatgtcgcacatgcccagtcaacggctgaccatgccaacgctaacgccaacaccgctctgatgaacggcgtcaaactctcctctgctgtgacagaaaacaaaaataatatcgaacagaaccgcagcgatattgctgaccagcagaaactgttggcatcaaacgagcaaaaacagatcgtccgcgacaacgggcaggataccgccattcaggacgcacaacatgccgccaactgggcttcaatgaaagctgatgacgcgcagcacgccatcacggtggcgcagacggatattgatgccaataaagccgccatcgccgacacccgtaatgatgtctccgcagtgcagtcagacgtcaccaacataaaaggcgatgtcgcacatgcccagtcaacggctgaccatgccaacgctaacgccaacaccgctctgattaacggcgtcaaactttccggtgctgtgacagaaaacaaaaataatatcgaacagaaccgcagcgatattgctgaccaacagcaacaactcgacgaaacccggaaaatcgttgccgccaccggggatgtgcagactgccgcccgatatcagagcatgattgacgccagacagacagccgctgccaatgcgcaacaggcacaagctgacacccagcagcaacaaatggacgatcagcagaaacaaatcgacgcgacgcaaaaaacggtttccgcacttggcgatgcccagaccaacgcacattatcaagagatggttaacgccggactgagagcacaaaatgatgcgaatgcgcgtactgcagcagaacaaaaacaaaaaatagatactctggcgactaaccaggcaacgcaacagcatatcaatagtgtgcagtacggggaacaaattcagcgtctggcgcaagactcaacacaaacgcatgaacaaattgacagcctgacacaagacgtaacccaaacgcatcagcagttaagcaacacgcaaaaacgagtagcggataatagccagcagattactacgctcaataaccatttcagttcgctgaaaaacgaagttgaggacaaccgtaaagaagccaatgcgggaactgcatcagccatcgctatcgcctcacaaccacaggtgaaagccggtgactttatgatgatgtcagcgggagcgggaaccttcaacggtgaatctgcggtgtctgtcggaacatcttttaatgccggaacgcataccgtgattaaagccggtgtctctgcggatacgcaatctgatttcggcgcgggtgtcggcgtgggatattctttc

SEQ ID NO: 620 - DNA, 2970 bp, Escherichia coli
atgaaggagaataaccttaatcgcgtcatcggatggtctggtttactgctgacgtctttattgagtaccagcgcactcgcagacaatatcggcaccagcgcagaagagctggggctgagcgattatcgccattttgttatttatccccgtctcgataaggcgctgaaggcacagaaaaataacgacgaagcaaccgccatccgcgaatttgaatatatacaccagcaggtgccggataatattccgctggctttataccttgcggaagcctatcgctattttggtcatgatgaccgggcgcggctgttgcttgaggatcaactgaaacgtcacccaggagatgcccgacttgagcgcagtctggcggctattccagttgaagtgaaaagcgttacgacagttgaagaactgcttgcccagcaaaaagcgtgcgatgctgcgccgaccctgcgttgtcgcagtgaagttgggcagaatgccctgcggctggcacaattacctgtcgccagagcgcaactgaacgatgcgacgtttgctgcatcgccggaaggaaaaacgctgcgaaccgatctgctgcaacgggcaatctacctgaagcaatggtcccaggcagatacgctatacaatgaagcacgccagcagaacacattaagcgcggcagaacgccgccagtggtttgatgtgcttcttgccgggcagctggacgatcggatcctggcgctgcaatcacaggggatcttcaccgatccgcagtcatatattacttacgcgaccgcgctggcttatcgtgacgaaaaagcacgcctccagcgttatctcattgaaaatactccgctatttaccacggacgcacaagagaaaagttggctctatctgttatctaaatacagcggcaaccccgttcaggcgttggcgaattatacggtacagtttgccgacaaccgccagtatgttgttggcgcgacgctaccggtgctgttaaaagaaggtcagtacgacgcagcgcaaaaactgctcgccaccctccccgccaatgaaatgcttgaggagcgttataccgttagcgtagcgacccataacaaggctgaagctctgcgtctggcacgattgctgtatcagcaagaaccggcaaatcttacccgcctggatcaactgacctggcaactgatgcagaacgagcagtcacgcgaagctgccgatttattgctgcaacgctatcctttccagggcgatgcgcgtgtcagccagactttaatggcgcgactggcgtctctgctggaaagtcatccttacctggcaacgccggcgaaggtggcgattttatcgaaacccttaccgctggcggagcaacgtcagtggcaaagtcagttgccgggtattgcagataattgcccggcaatagttcgcttgctgggcgatatgtcgccttcctacgatgccgccgcctggaaccgtctggcaaagtgttatcgggacacgctacccggtgtggcgttgtatgcatggcttcaggccgaacaacgacaaccgaacgcctggcaacatcgtgcggtagcctatcaagcgtatcaggttgaggactacgccaccgcactggcggcctggcagaaaatcagtcttcacgacatgagcaatgaggatctgcttgctgctgccaataccgcccaggcggcaggaaatggtgcggctcgcgatcgctggcttcagcaggcagaacaacgtgggctgggaaacaatgccctctactggtggctgcatgcgcaacgttacattcctggtcagccggaactcgcactgaacgatctcacgcgctcaatcaatattgcgccttctgccaacgcttacgttgcgcgggcgacaatttatcgccaacgtcataatgtcccagcggcagtgagtgatttgcgcgccgcgctggaactggagccgaataatagcaacacccaggcagcgctcggttacgccttgtgggatagcggtgatatcgcacagtcgcgggaaatgctcgaacaggcgcataaagggctaccggacgatccggcacttatccgacaactggcctacgtgaaccagcgtctggatgacatgcctgcgacgcagcactacgcccggctggtgattgatgacattgataatcaggcgctgataaccccactgaccccagagcaaaatcagcaacgcttcaatttccgccgtctgcatgaggaggtcggtcgccgctggacgttcagtttcgattcttccatcggcttgcgttccggcgcgatgagtaccgctaacaataatgtcggcggcgcagcgccagggaaaagctatcgtagctacgggcaactggaagccgagtaccgcatcggacgcaatatgctgctggaaggcgacctgctctcggtttacagccgtgtatttgccgataccggagaaaacggggtgatgatgccggtgaaaaatccgatgtccggcaccggtctgcgctggaagccgctgcgcgatcagatctttttcctcgccgtcgaacagcagttgccgctgaacgggcaaaatggcgcatccgataccatgctgcgcgccagcgcctcattctttaatggcggcaaatacagcgatgaatggcacccgaacggttcaggctggtttgcccaaaacctgtacctcgatgcggcgcaatatgtccgccaggatattcaggcgtggacggcagattatcgcgtcagctggcatcagaaggtggcgaacggacagactattgagccttacgctcacgttcaggacaacggttatcgtgataaaggcactcagggcgcgcagcttggcggtgtcggggtccgctggaatatctggaccggcgagacgcactacgacgcctggccgcacaaagtcagtctcggcgtcgagtatcaacatacctttaaggcaattaatcaacgtaacggagagcgcaacaacgcgtttctcaccattggagtgcactgg

SEQ ID NO: 621 - DNA, 1668 bp, Escherichia coli
atggataatgcagaactcgccattggtatcgatctcggtactaccaatagtttaattgccgtctggaaagacggtgccgcgcaattaattccaaataagttcggtgaatatttaacaccatccataattagcatggatgaaaataatcatattttagtcggaaaacccgctgtatcacggcgcacttcgcatccggataaaacggcagcgttatttaaacgtgcaatgggcagtaataccaactggcggttaggcagcgacacatttaacgcgccagaactgtcctctttggtattacgctcattaaaagaagatgccgaagaatttctgcaacgtccgattaaagatgtggtgatctccgttccggcttatttcagcgatgaacaacgcaagcatacccgtttagcagcggagttagccgggttaaatgcggtacgcttaattaatgaacccacagcagctgcgatggcatatggcctgcatacgcaacaaaatacccgctcgctggtttttgatctcggtggcggcacgtttgacgtcacggtgctcgaatacgccacgccggtgattgaagttcacgcctccgctggcgacaactttcttggcggcgaagattttactcatatgctggtggatgaagttttaaaacgcgccgcagtggctaaaaacatgctcaacgaaagtgagctggcagccctgtacaccagcgtggaagcggcaaaatgcggcaatcaattaccgctgcaaattagctggcagtatcaggaagaaacgcgtgagtgcgaattttacgagaacgaactggaagatttgtggttgccgctgctcaatcgcttgcgagtgccgattgaacaggcgttgcgcgatgcacgtctgaagcccagtcaaatcgacagtctggtgctggttggcggcgcatcacaaatgccgctggtgcagcgaatcgccgtacgtctgtttggcaaattaccatatcaaagttacgacccgagcaccattgtcgcgctgggcgcagcaatccaggccgcctgccgcttacgcagtgaagatattgaagaggtgatcctcactgatatttgcccttactcgttgggtgttgaagttaaccgccagggcgtttccggcattttctcgccgataattgaacgaaacaccactgtaccggtgtcgcgtgtagaaacttactcgaccatgcacccggaacaggattcaattacggttaacgtctatcaaggagaaaatcacaaagttaaaaataacattctggtggaatcctttgatgtgccgttgaagaaaaccggggcttatcagtcgattgatattcgctttagttatgatatcaacgggttgcttgaagttgacgtgcttctggaagacggcagcgttaagtccagagtcattaatcacagtcctgtaacattgagcgcacagcagattgaagagagtcggacgcggttatccgcattgaaaatttatccgcgcgatatgctcatcaaccgtacctttaaagccaaactggaagagttgtgggcgcgggcgctgggtgacgagcgagaagagatcggccgggtgatcaccgattttgatgcggcgttgcagtcaaacgatatggcccgcgtcgatgaagttcggcgacgggcgagcgattatttggctattgagatccct

SEQ ID NO: 622 - DNA, 495 bp, Escherichia coli
atgcctccatcattacgaaaagccgttgctgctgctattggtggcggagcaattgctatagcatcagtgttaatcactggcccaagtggtaacgatggtctggaaggtgtcagctacataccatacaaagatattgttggtgtatggactgtatgtcacgggcatacaggaaaagacatcatgctcggtaaaacgtataccaaagcagaatgcaaagccctcctgaataaagaccttgccacggtcgccagacaaattaacccgtacataaaagttgatataccggaaacaacgcgcggcgctctttactcgttcgtttacaacgtgggcgctggcaatttcagaacatcgacgcttcttcgcaaaataaaccagggcgatatcaaaggcgcatgtgatcagctacgtcgctggacatatgctggcggtaagcaatggaaaggtctcatgactcgtcgtgagattgagcgtgaaatctgtttgtggggtcagcaa

SEQ ID NO: 623 - protein, 1749 aa, Escherichia coli
GTGACGAGGCAGGACATGAATGATGCCGTTATCACGCTGAACGGCCTGGAAAAACGCTTTCCGGGCATGGACAAGCCCGCCGTCGCGCCGCTCGATTGCACCATTCATGCCGGTTATGTGACGGGGCTGGTAGGGCCAGACGGTGCGGGTAAAACCACGCTCATGCGGATGCTGGCGGGATTACTGAAACCCGACAGCGGCAGTGCCACGGTGATTGGCTTTGATCCGATCAAAAATGACGGCGCGCTGCACGCCGTGCTCGGCTATATGCCGCAGAAATTTGGTCTGTATGAAGATCTGACGGTGATGGAGAACCTCAATCTTTACGCGGATTTGCGCAGCGTCACCGGCGAGGCACGGAAGCAGACTTTTTCTCGCCTGCTGGAGTTTACGTCTCTTGGCCCGTTTACCGGACGCCTGGCGGGCAAGCTCTCCGGTGGGATGAAACAAAAACTCGGCCTGGCCTGTACCCTGGTGGGCGAACCGAAAGTGTTGCTGCTCGATGAACCCGGCGTCGGCGTTGACCCTATCTCACGGCGCGAACTGTGGCAGATGGTGCATGAGCTGGCAGGCGAAGGGATGTTAATCCTCTGGAGTACCTCGTATCTCGACGAAGCCGAGCAGTGCCGTGACGTGTTACTAATGAACGAAGGCGAGTTGCTGTATCAGGGGGAACCAAAAGCCCTGACACAAACCATGGCCGGACGCAGCTTTCTGATGACCAGCCCGCACGAGGGCAACCGCAAACTGTTGCAACGGGCATTGAAACTGCCGCAGGTCAGCGACGGCATGATTCAGGGGAAATCGGTACGTCTGATCCTCAAAAAAGAGGCTACACCAGACGATATTCGCCACGCCGACGGGATGCCGGAAATCAACATCAACGAAACTACGCCACGTTTTGAAGATGCGTTTATTGATTTGCTGGGCGGTGCCGGAACCTCGGAATCGCCGCTGGGCGCAATATTGCATACGGTGGAAGGTACACCTGGCGAGACGGTGATCGAAGCGAAAGAACTGACCAAAAAATTTGGTGATTTTGCCGCCACCGATCACGTCAACTTTGCCGTTAAACGCGGGGAGATTTTTGGTTTGCTGGGGCCAAACGGCGCGGGCAAATCGACCACCTTTAAGATGATGTGCGGTTTGCTGGTGCCGACTTCCGGCCAGGCGCTGGTGCTGGGGATGGATCTGAAAGAGAGTTCCGGTAAAGCGCGCCAGCATCTCGGCTATATGGCGCAAAAATTTTCGCTCTACGGCAACCTGACGGTCGAACAGAATTTACGCTTTTTCTCTGGTGTGTATGGCTTACGCGGTCGGGCGCAGAACGAAAAAATCTCCCGTATGAGCGAGGCGTTCGGCCTGAAAAGTATCGCCTCCCACGCGACCGATGAACTGCCATTAGGTTTTAAACAGCGGCTGGCGCTGGCCTGTTCGCTGATGCATGAACCGGACATTCTGTTTCTCGACGAACCGACGTCCGGCGTTGATCCCCTCACCCGCCGTGAATTTTGGCTACATATCAACAGTATGGTAGAGAAAGGCGTCACGGTGATGGTCACCACCCACTTTATGGATGAAGCAGAATATTGCGACCGCATCGGCCTGGTGTACCGCGGGAAATTAATCGCCAGCGGCACACCGGACGATTTGAAAGCGCAGTCGGCCAACGATGAGCAACCCGATCCCACTATGGAGCAAGCCTTTATTCAGTTGATCCACGACTGGGATAAGGAGCATAGCAATGAG

SEQ ID NO: 624 - DNA, 2280 bp, Escherichia coli
atggaaaacaatcgcaatttccctgccagacaatttcattcgctcacgttctttgctggtctttgtattagcatcacgcctgtggctcaggcactcgccgccgaagggcaagctaacgcggatgacacgctggttgtcgaagcatcaacgccttcgctttatgcgccacaacaatctgctgatccgaaattctcgcgtccggtagcggatactacccgcacgatgacggtgatttctgaacaagtgattaaagatcagggcgcaaccaaccttaccgacgcgctcaaaaacgtccccggcgtgggtgcgttttttgcgggtgagaacggtaactccaccactggcgacgccatttatatgcgtggtgccgatacctctaacagtatttatattgatggcattcgcgatatcggcagcgtctcgcgcgacaccttcaataccgagcaggtcgaagtgattaaagggccgtccggcaccgactacgggcgcagcgcaccgacgggctcgatcaatatgatcagcaagcagccgcgcaatgattcgggcattgacgcctccgccagtattggcagcgcctggttccgccgcggcacgctggacgtcaatcaggtcattggtgataccactgcggtgcgcctgaacgtgatgggtgaaaaaacgcacgatgccggacgcgacaaagtcaaaaatgagcgttacggcgtcgccccttctgtcgcttttggccttggtacagcgaatcgtttgtatcttaattatctgcatgtcacccagcacaacacgccagacggtggcattccgactatcggtttgccgggctattctgccccatctgcgggaacagcggccctgaatcattccggaaaagttgatactcataacttttacggcacggattccgattacgacgattcgaccaccgacaccgctaccatgcgttttgagcacgacatcaacgataacaccaccattcgcaatactacccgttggtcgcgcgtgaagcaggattacctgatgacggcgattatgggcggggcgtcgaatattacccagcccaccagcgatgtgaatagctggacctggtcacgcacggcgaataccaaagatgtgagtaataaaattctcaccaaccagaccaacctgacctcgacgttctataccggttctatcggtcatgatgtcagtaccggcgtggaatttacccgtgaaacgcagactaactacggcgttaatccggtgacgttacctgcggtaaatatttatcatcctgacagcagcattcatcccggcggcctgacgcgcaacggcgcaaacgccaatggtcagacggataccttcgcaatttacgccttcgatacgctgcaaatcacccgtgattttgagctgaacggcgggatccgtctggataattatcatactgaatatgacagtgccaccgcctgcggcggcagcggacgcggtgccatcacctgccctgctggcatggcaaaaggttctccggtcaccaccgtcgataccgctaagtcgggcaatctggtgaactggaaagccggggcgctgtatcacctgacggaaaacggcaatgtctatattaactatgccgtttcccagcaacctccgggcggcaacaacttcgcccttgcgcagtctggcagcggtaacagtgccaaccgcaccgattttaaaccgcaaaaagccaacaccagcgagattggcaccaaatggcaggttctggataaacgcctgttgctcaccgccgcgctgttccgtactgatatcgaaaatgaagttgagcaaaatgatgacggaacttactcgcaatacggtaagaaacgcgtcgaaggctatgagatatccgtggccgggaatatcactcccgcgtggcaggtgattggcggctatacccagcaaaaagcaaccatcaaaaacggcaaagatgttgcccaggatggttcctcatcgctgccgtataccccggagcacgcctttaccttatggagccagtatcaggcaaccgatgatatttccgttggtgcgggcgcacgctatatcggcagtatgcataaaggttctgacggcgcggtgggaacgccagcgtttaccgaaggttactgggtcgccgacgctaaactggggtatcgggttaatcgcaatctcgacttccagctaaacgtctacaacctgtttgataccgattacgtcgcctcaatcaacaagagcggctaccgttatcacccgggcgagccaagaaccttcctgctcacggccaatatgcatttc

SEQ ID NO: 625 - DNA, 720 bp, Escherichia coli
atgacgccaaccattgaacttatttgtggccatcgctccattcgccatttcactgatgaacccatttccgaagcgcagcgtgaggcgattattaacagcgcccgtgcgacgtccagttccagttttttgcagtgcagtagcattattcgcattaccgacaaagcgttacgtgaagaactggtgacgctgaccggtgggcaaaaacacgtagcgcaagcggcggagttctgggtgttctgtgccgactttaaccgccatttacagatctgtccggatgcacaacttggcctggcggagcaactgttgctcggtgtcgttgatacagcaatgatggcgcagaatgcgttaaccgcagcggaatcgctgggattgggcggggtatatatcggcggcctgcgcaataatattgaagcggtgacggaactgctgaaattaccgcagcatgttctgccgctgtttgggctgtgccttggctggcctgcggataatccggatcttaagccgcgtttaccggcttccattttggtgcatgaaaacagctatcaaccgctggataaagacgcactggcgcagtatgacgaacaactggcggaatattacctcacccgtggcagcaataatcgccgggatacctggagcgatcatatccgccgaacaatcattaaagaaagccgcccatttatactggattatttgcacaaacagggttgggcgacgcgc

SEQ ID NO: 626 - DNA, 1047 bp, Escherichia coli
atgcgcacgtcattttctcaacaacagtggattgatatgaaggtactggttaccggcgccaccagcggcttaggtcgaaacgcggtagagtttttatgccagaaaggcatcagcgtgcgagcgaccggtcgcaacgaggcaatgggtaaattgctggaaaaaatgggcgcagagtttgttccggcggatctgaccgagctggtctcatcacaagctaaagtgatgctcgcgggcattgatacgctgtggcactgctccagctttacctcgccctgggggacacaacaggctttcgatctggctaacgttcgcgccactcgccgcctgggtgaatgggctgtcgcctggggtgtgcgtaactttattcatatctcttccccctccctgtacttcgattatcaccaccatcgcgatattaaagaagattttcgccctcaccgcttcgccaacgagtttgcccgcagcaaagcagccagcgaagaggtgatcaatatgctttcgcaggcgaatccacaaacgcgctttactattctgcgcccacaaagtctgttcggaccgcacgataaagtctttattccccgtctggcgcatatgatgcaccactatggcagcattctgttaccgcacggcggcagtgcgctggtggatatgacctactatgaaaatgccgtgcacgccatgtggctggcaagccaggaagcctgcgataagctaccttccgggcgtgtgtacaacatcaccaatggcgagcatcgcacactgcgcagcatcgtgcagaagctgatcgacgagttgaatattgactgtcgtattcgttccgtcccctacccgatgctggatatgatcgcccgcagcatggagcgtttaggccgcaagtcagcaaaagagccgccgctgacccactacggcgtctccaagttgaattttgactttacgctggatattacgcgtgcgcaggaagagttaggttatcaaccagtcctcacccttgatgaaggtatcgagaaaactgccgcctggctacgcgaccacggaaaactgccgcgc

SEQ ID NO: 627 - DNA, 1194 bp, Escherichia coli
atgccccgctttacatatatttgcattaataaaataattgtaattataaagttaaatatcggtaatttgtatttaataaatacgatcgatattgttactttattcgcctggtgctcccttttaattaactgttttagcggaggatgcggaaaaaattcaactcatttgttaatttttaaaatttatttttatttggataatcaaatatttactccgtattggcataaaaaccatgcgagttacgggcctataagccaggcgagatatgatctatatcaatttctcatctataatgctttgttagtatctcgtcgccgacttaataaagagagagttagtgtgaaagctgacaacccttttgatcttttacttcctgcagcaatggccaaagtggccgaagaggcaggtgtctataaagcaacgaaacatccgcttaagactttctatctggcgattaccgccggtgttttcatctcaatcgcattcgtcttctatatcacagcaaccactggcacaggcacaatgcccttcggcatggcaaaactggttggcggcatttgcttctctctggggctgattctttgtgttgtctgcggagccgatctctttacttccacagtgttgattgttgttgctaaggcgagtgggcgcatcacctggggtcagttggcgaaaaactggctaaatgtctattttggcaacctggtcggcgcactgctgtttgtacttttaatgtggctttccggcgagtatatgaccgcaaatggtcaatggggactaaacgtcctacaaaccgccgaccacaaagtgcatcatacttttattgaggccgtctgtcttggtatcctggcaaacctgatggtatgtctggcagtatggatgagttattctggccgcagcctgatggacaaagcgttcattatggtgctgccggtcgcgatgtttgttgccagcggttttgagcacagtatcgcaaacatgtttatgatcccgatgggtattgtaatccgcgacttcgcatctccggaattctggaccgctgtcggttctgcaccggaaaatttttctcacctgaccgtgatgaacttcatcactgataacctgattccggttacgatcggtaatattatcggcggtggtttgttggttgggttgacatactgggtcatttatctgcgtgaaaacgatcaccat

SEQ ID NO: 628 - DNA, 1200 bp, Escherichia coli
atgcgcgataacggcgcgcctgccgatttactcaaaacactgggatttttgctgaacaatttacgcgctattgatgcccaactggcaacaattgaatcagaacaggcccaggcactgccccataataatgacgaaaatgagctcgctgatgacagcccgcacggattgagtgatatctggctgcgtcttagccgtcacttcacgccggaatcagccctcttccgtcatgcggtaagaatgtcgctggtgttgtgctttggctacgccatcattcagataaccggaatgcatcacgggtattggatcttgctgacaagtttgtttgtctgccagccaaactataacgccacgcgccaccgcctgaagttaaggattattggtacgctggtcggtatcgccattggcattcctgtgctgtggtttgtgccatcactggaagggcagctggtgctgctggttattaccggcgtgctcttttttgccttccgtaatgtgcaatatgcccatgcaacgatgttcatcacacttttggtgctactgtgttttaacttgctgggtgaaggttttgaagtggcgttacctcgcgtaatcgatacgctgattggttgtgccattgcgtgggcggcagtgagctacatctggcctgactggaagtttcgcaatctgccgcgaatgctcgaacgcgccacagaggccaactgtcggtatctcgatgccatactggagcaataccatcagggacgtgataaccgtctggcgtatcgtattgcccgccgcgatgcacacaaccgtgatgctgaactggcgtcggtggtatcaaatatgtccagcgagccgaacgttaccccgcaaattcgcgaggccgcgtttcggttgctgtgccttaaccatacgtttaccagctatatctcagccctcggtgctcaccgggagcagttaactaatcctgatattctggcgtttcttgatgacgcagtttgctatgttgatgacgcgctacatcatcaacctgctgatgaagaacgcgtcaatcaggcattagctggcctgaaacagcgaatgcagcaacttgaaccgcgggcagacagcaaagaacctctggtcgtacaacaagtcgggttattgattgcattactgccagagattggtcgtctgcaacgccagattactcaagttccgcaggaaactcctgtttcggcg

SEQ ID NO: 629 - DNA, 1050 bp, Escherichia coli
atgccagtgttacacaaccgcatttccaacgacgcgttaaaagccaaaatgttggctgagagcgaaccgcgaaccaccatttcgttttacaagtatttccacatcgccgatcctaaggcgacccgtgacgctttatatcagctgtttaccgcgctggatgtttttgggcgagtgtatctggcgcatgagggcattaacgcgcaaatcagcgtacctgcgagcaatgttgaaacatttcgcgcgcagctttatgccttcgacccggctttagagggcttacgcctgaatatcgcgttggatgatgacgggaaatccttctgggtactgcgcatgaaggtccgtgatcgtatcgttgccgacggtattgacgatcctcacttcgatgccagcaatgtgggtgagtatctgcaagcggcggaagtgaacgccatgcttgacgatcccgatgcattgtttatcgacatgcgtaaccactatgagtatgaagtggggcactttgaaaacgcgctggaaattccggcagataccttccgtgagcagttgccaaaagcagtcgagatgatgcaggcacataaagataaaaaaatcgtcatgtactgcaccggcggcattcgttgtgaaaaagccagtgcctggatgaaacataacggattcaataaagtctggcatatcgagggcggaattattgaatacgcccgcaaggcgcgcgagcagggtttaccggtacgttttattggcaaaaattttgtttttgacgagcggatgggcgaacgtatatctgatgagattatcgcgcattgccaccagtgcggtgcgccgtgcgacagccataccaactgtaaaaatgatggctgccacctgctttttattcagtgtccagtatgtgcggaaaaatacaaaggttgttgtagtgagatttgctgcgaagaaagcgcgttaccgcctgaagaacagcgacgccgtcgggcaggacgtgaaaatggcaataagatctttaataagtctcgtggacgtctgaatacaacactgggcattcctgatccaacagaa

SEQ ID NO: 630 - DNA, 3183 bp, Escherichia coli
atgaaaagaatgttaatcaacgcaactcagcaggaagagttgcgcgttgcccttgtagatgggcagcgtctgtatgacctggatatcgaaagtccagggcacgagcagaaaaaggcaaacatctacaaaggtaaaatcacccgcattgaaccgagtctggaagctgcttttgttgattacggcgctgaacgtcacggtttcctcccactaaaagaaattgcccgcgaatatttccctgctaactacagtgcacatggtcgtcccaacattaaagatgtgttgcgtgaaggtcaggaagtcattgttcagatcgataaagaagagcgcggcaacaaaggcgcggcattaaccacctttatcagtctggcgggtagctatctggttctgatgccgaacaacccgcgcgcgggtggcatttctcgtcgtatcgaaggcgacgaccgtaccgaattaaaagaagcactggcaagccttgaactgccggaaggcatggggctaatcgtgcgcaccgctggcgtcggcaaatctgctgaggcgctgcaatgggatttaagcttccgtctgaaacactgggaagccatcaaaaaagccgctgaaagccgcccggctccgttcctgattcatcaggagagcaacgtcatcgttcgcgcattccgcgattacttacgtcaggacatcggcgaaatccttatcgataacccgaaagtgctcgaactggcacgtcagcatatcgctgcattaggtcgcccggatttcagcagcaaaatcaaactgtacaccggcgagatcccgctgttcagccactaccagatcgagtcacagattgagtccgccttccagcgtgaagttcgtctgccgtctggtggttccattgttatcgacagcaccgaagcgttaacggccatcgacatcaactccgcacgcgcgacccgcggcggcgatatcgaagaaaccgcgtttaacaccaacctcgaagctgccgatgagattgctcgtcagctgcgcctgcgtgacctcggcggcctgattgttatcgacttcatcgacatgacgccagtacgccaccagcgtgcggtagaaaaccgtctgcgtgaagcggtgcgtcaggaccgtgcgcgtattcaaatcagccatatttctcgctttggcctgctggaaatgtcccgtcagcgcctgagcccatcattgggtgaatccagccatcacgtctgcccgcgctgctccggtaccggtaccgtgcgtgacaacgaatcgctgtcgctctctattctgcgtctgatcgaagaagaagcgctgaaagagaacacccaggaagttcacgccattgttcctgtgccaatcgcttcttatctgctgaatgaaaaacgttctgcagtgaatgcgattgaaactcgtcaggacggcgtgcgctgtgtgattgtgccaaacgatcagatggaaaccccgcactaccatgtgctgcgcgtgcgcaaaggggaagaaaccccaaccttaagctacatgctgccgaagctgcatgaagaagcgatggcgctgccgtctgaagaagagttcgctgaacgtaagcgtccggaacaacctgcgctggctacctttgccatgccggatgtgccgccagcaccaaccccagctgaacctgccgcgcctgtcgtagccccagcacctaaagctgcaccggcaacaccagcagctcctgcacaacctgggctgttaagccgcttcttcggcgcactgaaagcgctgttcagcggtggtgaagaaaccaaaccgaccgagcaaccagcaccgaaagcagaagcgaaaccggaacgtcaacaggatcgtcgcaagcctcgtcagaacaaccgccgtgaccgtaatgagcgccgcgatacccgtagtgaacgtacagaaggcagcgataatcgcgaagaaaaccgtcgtaatcgtcgccaggcacagcagcagactgccgagacgcgtgagagccgtcagcaggctgaggtaacggaaaaagcgcgtaccaccgacgagcagcaagcgccgcgtcgtgaacgtagccgccgccgtaacgatgataaacgtcaggcgcaacaagaagcgaaggcgctgaatgttgaagagcaatctgttcaggaaaccgaacaggaagaacgtgtacgtccggttcagccgcgtcgtaaacagcgtcagctcaatcagaaagtgcgttacgagcaaagcgtagccgaagaagcggtagtcgcaccggtggttgaagaaactgtcgctgccgaaccaattgttcaggaagcgccagctccacgcacagaactggtgaaagtcccgctgccagtcgtagcgcaagctgcaccagaacagcaagaagagaacaatgccgataaccgtgacaacggtggcatgccgcgtcgttctcgccgctcgcctcgtcacctgcgcgtgagtggtcagcgtcgtcgtcgctatcgtgacgagcgttatccaacccaatcgccaatgccgttgaccgtagcgtgcgcatctccggaactggcctctggcaaagtctggatccgctatccaattgtacgtccgcaagatgtacaggtcgaagagcagcgcgaacaggaagaagtacaagtgcagccgatggtgactgaggtccctgtcgccgccgctgtcgaacctgttgttagcgcaccggttgttgaagaagtggctgaagttgtagaagcccccgttcaggttgccgaaccgcaaccggaagtggttgaaacgacgcatcctgaagtgattgccgccgcggtaactgaacagccgcaggtgattaccgagactgatgttgccgtagcccaggaagttgcagaacacgcagaaccggtggttgaaccgcaggaagagacggcagatattgaagaagttgccgaaactgctgaggttgtggttgctgaacctgaagttgttgctcaacctgccgcgcctgtcgtcgctgaagtcgcagcagaagttgaaacggtagccgcggttaaacctgaggtcaccgttgagcataaccacgctaccgcgccaatgacgcgcgctccggcaccggaatatgttccggaggcaccgcgtcacagtgactggcagcgccctacttttgccttcgaaggcaaaggtgccgcaggtggtcatacggcaacgcatcatgcctctgccgctcctgcgcgtccgcaacctgttgag

SEQ ID NO: 631 - DNA, 2190 bp, Escherichia coli
gtggcgaccggtgcgctggcgtatgcctggtatcagggcaactcaaccctgtccgatttcaacaaaacgctggtcctttccggcaatcaggcgggactgacggcagatcgtattctggccctgtccagagccgggcaggcggcagggctgacgtttaaccagaccagcgagtcactgacggcgctggtgaatgccggtgtgcgtggtggtgagcagtttgaggcgatcagccagagtgtggcgcgtttctcctctgcatccggcgtggaggtggacaaggtcgctgaagccttcgggaagctgaccacagacccgacgtcgggactgacagcgatggcacgtcagttccataacgtgacggcggagcagattgcgtatgttgctcagttgcagcgttccggagatgaggccggggcattgcaggcggcgaacgaggccgcaacgaaagggtttgatgaccagacccgccgcctgaaagagaacatgggcacgctggagacctgggcagacaggacagcacgggcattcaaatccatgtgggattcggtgctggatattggtcgcccggacactgcccagggaatgctggagaaagcagaaaaggcttttgatgaggcggacaaaaaatggcagtggtatcagagccgaagccaccggcgcggtaaaacctcagcatttcttgccaatctccggggagcatgggaggacagagcgaatgcgcaacttgggctttcagccgccacgttgcaggccgatcttgaaaaggccagagagatggcagcaaaggactgggccgagtctgaggcatcacggctgaaatataccgaagaggcgcagaaggcttacgaacgcctgcagacgccgctggagaaatataccgcccgtcaggaagaactgaacaaggcactgaaagacgggaaaatcctgcaggcagattacaacacgctgatggcggcggcgaaaaaggattatgaagcgacgctgaaaaagccgaaacagtccggcgtgaaagtgtctgcgggcgatcgtcaggaagacagtgctcatgctgccctgctgacgcttcaggctgaactccggacgctggagaagcatgccggagcaaatgagaaaatcagccagcagcgccgggatttgtggaaggcggagagtcagttcgcggtactggaggaggcggcgcaacgtcgccagctgtccgcacaggagaaatccctgctggcgcataaagatgagacgctggagtacaaacgccagctggctgcacttggcgacaaggttacgtatcaggagcgcctgaacgcgctggcgcagcaggcggataagttcgcacagcaacaacgggcaaaacgggcagccattgaggcgaaaaaccgggggcttactgaccggcaggcagcgcgggaagccacagaacagcgcctgaaggaacagtatggcgataattcgctggcgctgaataacgtcatgtcagagcagaaaaagacctgggcggctgaagaccagcttcgcgggagctggatggcaggcctcaggtccggctggagtgagtgggaagagagcgccacggacagtatgtcgcaggttaaaagtgcagccacgcagacctttgatggtattgcgcagaatatggcggcgatgctgaccggcagtgagcagaactggcgcagcttcacccgttccgtgctgtccatgatgacagaaattctgcttaagcaggcaatggtggggattgtcgggagtatcggtagcgccattggcggggctgttggtggcggcgcatccgcatcaggcggtacagccattcaggcagctgcggcgaaattccattttgcaaccggaggatttacgggaaccggcggcaaatatgagccagcggggattgttcaccgtggtgaatttgtcttcacgaaggaggcaaccagccgaattggtgtcggcaacctgtaccgcctgatgcggggctatgcggaaggtggttatgtgggcggtgccggaagtccggcgcagatgcggcgggctgaaggcattaattttaatcagaacaatcacgtggtgattcagaacgacggtacgaatggtctgccaggtccacagatgatgaaggcagtgtatgacatggcccgcaagggtgcccgtgatgaaattcaggcacagatgcgcgatggtggtctgttctccggaggtggacga

SEQ ID NO: 632 - DNA, 2967 bp, Escherichia coli
gtgaatatggcagtaaagatttcaggtgtactgaaagacggcacaggaaaaccggtacagaactgcacaatccagctgaaagcaaaacgtaacagcaccacggtggtggtgaacacgctggcctcagaaaatccggatgaggccgggcgttacagcatggacgttgagtacggtcagtacagcgttattctgttggtggaaggattcccgccgtcacatgccgggaccatcaccgtgtatgaagattcccgacccggtacgctgaatgattttctcggtgccatgacggaggatgatgcccgtcctgaggcactgcgccgttttgaactgatggtggaagaggtggcgcgtaacgcgtccgcagtggcgcagaacacagcagccgcgaagaagtcagccagcgatgccagcacatcagcccgtgaggcggcaacccatgcgactgatgctgcaggctcagcacgtgcagccagcacatcagccgggcaggccgcgacgtcggctcagtcagcgtcttccagcgcaggaacggcatcaacaaaggctactgaagcatcaaaaagtgctgccgctgcagagtcctcaaaaagcgcggcagctaccagtgccagtgccgcgaaaacgtcagaaacgaatgcggcagcgtcacaacaatcagcagccacttctgcatccgccgcgaccacgaaggcgtcagaagctgccacctcagcccgggatgcggcggcctcaaaagaggcggcaaaatcatcagaaacgagcgcagcctcgagcgccagtagtgcagcctcctcggcaacagcggcaggaaattccgcgaaggcggcaaaaacgtccgagacgaacgctaagtcttctgagacggcagcagcacagagtgcctccgcagcagcagactcaaaaacagcggctgcctcatctgccagcgccgcgtcaacaaatgccgggcaggcctcagccagtgccaccgccgccggaaaatcggcagaaagtgctgcatcgtccgcttcaacagccacaacgaaggctggcgaagccgctgtacaggccagcgcagcagcgaggtctgcttccgcagcgaagacatccgagacgaacgcgaaagcgtcggaaaccagcgcagaatcctcaaaaacggctgccgcatcgtccgccagttcggcggcgtcatcggcattatctgcgtctgcttcaaaagatgaggcgaccagacaggcgtcagcagcaaagggcagcgccacgacggcatccacgaaggcgacagaggcagctggcagtgcgacggcggcagctcagagcaaaagtacggcggaatccgcggcaacgcgcgccgagacagcggcaaaacgggcagaggatattgcatccgccgtcgcgcttgaggatgcgagcacgacgaaaaaggggatagtacagctcagcagtgcgactaacagcacttccgagtcactggcggcaacaccaaaagccgttaaggccgcgtatgagctggctaacgggaaatacaccgcacaggatgcaacgacagcacagaaagggatagttcagcttagcaacgcgaccaacagcacatctgaaatgctggcggcaacgccaaagtcggtaaaggcagcctatgaccttgctaacgggaaatatactgctcagaacgctacgacagcacaaaaaggaattgtccagctcagtagtgcaaccaacagcgcatctgaaacgcttgccgcgacaccgaaagcagtgaaagcagctaatgataatgcgaatggtcgggtaccttctgcccgtaaggtgaatggtaaggcgctttcagcggatataacactgacgccgaaagatattggtacgcttaactcaacaacaatgtcattcagcggtggtgctggttggttcaaattagcaacggtaaccatgccacaggcgagttctgttgtttcaattacgttgattggtggcgcgggatttaacgtggggtcacctcaacaggcaggtatatctgaacttgttttgcgtgcaggtaatggtaatccgaaggggattactggtgctttatggcagcgcacatcgacagggtttacaaattttgcctgggtcaatacatctggtgatacttacgatatttacgttgcaatcggaaattatgcgactggtgtaaatattcaatgggattataccagtaatgccagcgtgacgattcatacgtcaccagcatattctgctaataagccggaagggttaacggacggtacagtttattcactctatacgccatcagagcagttttatccgcctggcgcaccaatcccgtggccatcagataccgttccgtctggctatgccctgatgcaggggcagacttttgacaaatctgcatacccgaaacttgcagccgcttatccgtcaggcgtgatccctgatatgcgtggctggacgattaagggcaaacccgccagtggtcgtgccgtattgtctcaggaacaggacggcattaaatcgcacacccacagcgccagcgcatccagtacggatttggggacgaaaaacacatcgtcgtttgattacggaaccaaatccacgaataacaccggggcgcatacccatagtattagcgggactgcaaatagtgccggtgcgcaccaacacaagagttccggtgcatttggtggcacgaacacgagcattttccctaatggttataccgcgatttcaaatctaagcgcggggattatgagcacaacaagcggtagtggccagactcgtaatgcagggaagacatcatcagatggtgctcatacccactcgctgtccggcactgctgcaagcgcaggcgcacatgcacatactgtcggtattggtgctcatacgcactccgttgcgattggttcacatggacacaccatcaccgttaacgctgctggtaacgcggaaaacaccgtcaaaaacatcgcatttaactatattgtgaggcttgca

SEQ ID NO: 633 - DNA, 903 bp, Escherichia coli
atgagaaagataaaaatagggctggcgctgggatctggcgcggcgagaggttggtcgcatattggcgttattaatgcgctaaaaaaagtgggtattgaaattgatatcgttgcaggatgttcaattggttcgctggtgggcgctgcctatgcatgcgatcgattatctgcgctggaagattgggtaacctctttcagttattgggatgttttacgcctgatggatctctcctggcagcgcggtggattactgcgcggcgagcgtgtcttcaatcaatatcgcgaaataatgccggaaacagagatcgaaaattgttcccgtcgcttcgcggctgttgccaccaatttaagtactgggcgcgaattatggtttactgaaggcgatctccatcttgctattcgtgcatcatgcagtattccaggactaatggcacccgttgcgcataacggctactggctggttgatggcgctgtagttaacccaattcctatttcgctcacgcgtgcattgggtgctgatattgtgatagcggtcgacctgcagcacgatgctcatttgatgcaacaagatctgctctcctttaatgtcagtgaagaaaatagcgagaatggtgattctctgccgtggcatgcgcgtctgaaagaaaggttgggcagcataacgacacgtcgggcggtgacagcgccaacggcaacagagattatgaccacttctatccaggtgctggagaaccgccttaaaaggaaccgcatggcaggtgatccgcccgatattctgattcaacctgtttgcccgcaaatatctacgcttgatttccatcgcgcgcacgctgccattgcggctgggcagctggcagtggaaaagaaaatggacgaacttttgccgttggtacgcaccaacatt

SEQ ID NO: 634 - DNA, 732 bp, Escherichia coli
atgattatgacttcaatgacccttgatttacctcgccgcttcccctggccgacgttactttcggtctgcattcatggtgctgttgtggcgggtctgctctatacctcggtacatcaggttattgaactacctgcgcctgcgcagccaatttctgtcacgatggttgcgcctgcggatctcgaaccgccacaagccgttcagccaccaccggagccggtggtagaggcagaaccggaacctgagccgatccccgaaccgccaaaagaagcaccggtggtcattgaaaagccgaagccgaaacctaagccaaaaccgaagccggtgaaaaaggtacaggagcagccaaaacgcgatgtcaaacccgtagagtcgcgtccggcatcaccgtttgaaaatacggcacccgcgcgcccgacatcaagtacggcaacggctgcaaccagcaagccggttaccagtgtggcttcaggaccacgcgcattaagccgcaatcagccgcagtatccggcacgagcacaggcattgcgcattgaagggcaggttaaagttaaatttgatgtcacgccggatggtcacgtggataacgtgcaaatcctctcagccaagcctgcgaacatgtttgagcgtgaggtgaaaaatgcgatgcgcagatggcgttatgagccgggtaagccaggcagtgggattgtggtgaatatcctgtttaaaattaacggcaccaccgaaattcag

SEQ ID NO: 635 - DNA, 726 bp, Escherichia coli
atgaccgtaactcgcccacgcgccgaacgcggcgcatttccgcccggaacagaacattacggacgttcattattgggcgcgccgttaatctggtttcctgcccctgcagccagccgcgaaagtggtttgattctggctggcactcacggtgatgaaaactcttcggtcgtcacgctctcctgtgctctgcggacgttgacaccttctttgcgccgtcatcatgtggtgctgtgtgtgaatcctgacggctgccagttggggttacgggccaatgctaatggtgtggatttaaacagaaactttccggcggcgaactggaaggaaggtgaaaccgtttatcgctggaacagcgccgctgaagaacgtgatgtcgtattgctgacaggtgacaaacctggctccgaacctgaaacccaggcgctgtgccagcttatacaccgcattcaacctgcctgggtggtctcattccacgatccgctggcctgtattgaagatcccagacacagcgaattaggtgaatggctggcccaggcgtttgaattgcctctggtaaccagcgtcggttatgaaacgcctggctctttcggtagttggtgtgcggatctcaacctgcattgcatcaccgcagagtttccgcccatctcctccgacgaagccagcgaaaaatatatctttgcgatggcaaacttgctgcgctggcatcctaaagatgcaattcgcccgttg

SEQ ID NO: 636 - DNA, 1638 bp, Escherichia coli
atgaatacaactccctcacagcgattaggttttttgcatcacatcaggctggttccgttatttgcctgcattcttggcggtatcttagttctattcgcattaagttcagctctggctggctatttcctctggcaggccgatcgcgatcagcgtgatgttactgcggagattgagattcggaccgggttagcgaacagttcagattttttgcgttcagcccggatcaatatgattcaggccggtgctgcgagtcgtattgcggaaatggaagcaatgaagcgaaatattgcgcaagccgaatcggagattaaacagtcgcagcaaggttatcgtgcttatcagaatcggtcggtgaaaacacctgctgatgaagccctcgacactgaattaaatcaacgcttccaggcttatatcacgggtatgcaaccgatgttgaaatatgccaaaaatggcatgtttgaagcgattatcaatcatgaaagtgagcagatccgaccgctggataatgcttataccgatattttgagcaaagccgttaagatacgtagcaccagagccaaccaactggcggaactggcccatcagcgcacccgcctgggtgggatgttcatgattggcgcgtttgtgcttgccctggtcatgacgctgataacatttatggtgctacgtcggatcgtcattcgtccattgcaacatgccgcacaacggattgaaaaaatcgccagtggcgatctgacgatgaatgatgatccggcaggtcgtaatgaaatcggtcgcttaagtcgtcatttacagcaaatgcagcattcactggggatgacagtagggaccgttcgacagggcgcggaagagatttatcgtggcaccagcgaaatttccgctggcaatgcggacctttcatctcgcaccgaagaacaagcggcggcaattgaacaaactgccgccagcatggagcaactcactgcgacggtgaaacagaatacagataacgcgcatcatgccagcaaactggcgcaggaggcttctattaaagccagcgatggcgggcagacggtttccggtgtagtaaaaacgatgggcgctatctccacgagttcgaagaaaatttccgagatcaccgccgtcatcaacagtattgctttccagacgaatattctggcactgaatgctgccgttgaagccgcgcgagcgggtgagcaagggcgtggatttgccgttgtcgccagcgaagtacggacactcgcaagccgcagcgcccaggcggcgaaagagattgaaggcttgatcagtgaatcagtcaggttaattgacctggggtcggatgaggtagcaacggcagggaaaaccatgagcactattgttgatgccgtcgcgagtgtcacacatatcatgcaggaaatcgccgccgcctcggatgaacaaagcagaggcataacacaggttagccaggcgatttctgaaatggataaggtgacgcaacagaatgcttctctggtagaagaggcctcagcggcggcggtgtcccttgaagaacaggcggcacgattaactgaggcggtggacgtattccgtctgaacaaacattctgtgtcggccgaacctcgcggagcgggtgaaccagttagattcgctacggtg

SEQ ID NO: 637 - DNA, 666 bp, Escherichia coli
atgcgtaccacatcaattgcgaaagttgcagctttatgcggcttgttggctctgtctggttgtgcctctaaaatcacccagccagataaatattctggttttttaaacaattactctgatttaaaagaaacaacctcagcaacaggtaaacctgttttacgttgggtagacccgagttttgatcaaagcaaatatgacagcatcgtctggaacccagtcacttattatccggtaccgaaaccatctacccaggtagggcagaaagttctggataaaattttgagttataccaacaccgaaatgaaagaagcgattgcgcagcgtaaaccactggttaccaccgctgggccgcgtagtctgattttccgtggggccattaccggtgttgataccagcaaagaagggctgcaattctatgaagtggttcctgtcgcattagtggtcgcggggacgcaaatggcgacgggccaccgtaccatggatactcgcctgtattttgaaggtgagctgattgatgcagctactaataaaccggttatcaaagtcgttcgtcagggcgaaggtaaagacctgaataacgaaagtacgccaatggctttcgaaaatattaaacaagttattgatgacatggcgaccgatgccaccatgtttgacgttaacaaaaag

SEQ ID NO: 638 - DNA, 534 bp, Escherichia coli
atggaaaatctcgctcgctttttatccaccacacttaaacaactacgccagcagcgcggctggagtctttcgcgactggccgaagcgacaggcgtttctaaagcgatgttagggcagattgagcgtaatgagtccagcccgacggtcgcgacattatggaaaattgccaccgggttgaatgtgccattttcgacatttatttctccgccgcagtccgctacgccttcagtttatgatccgcaacagcaggcgatggtgatcacttcgctgtttccttatgatccacaactctgctttgaacacttctcgattcagatggcacctggtgcaataagtgaatcgacgccccatgagaagggagtaatcgaacatgttgtcgtcattgatgggcaacttgatctgtgcgttgatggtgaatggcagagccttaattgtggagaaggcgctcgatttgctgcagacgttacgcatgtctatcgtaatggtggggagcaaatcgtacattttcattccctcatccattacccacgcagt

SEQ ID NO: 639 - DNA, 1143 bp, Escherichia coli
atgagcaagacatttgcccgcagcagcctgtgtgcgctcaccatgacaataatcaccgctcatgccgccgaaccgcctaccaatttagataaaccggaagggcgactggatattatcgcctggccgggatacatcgaacgcggacaaactgataaacaatacgactgggtaacgcaattcgaaaaagagacaggctgcgcggtgaatgtgaaaaccgccgcgacttccgatgaaatggtcagtctgatgaccaaagggggttacgatctggttacagcatccggcgatgcctcgctgcgcctgattatgggcaaacgcgtgcagccgattaataccgcattgattcccaactggaaaacgctcgatccgcgcgtggttaaaggcgactggtttaacgttagtggcaaagtttatggcacaccctaccaatgggggccgaacctgttgatgtacaacactaaaaccttcccgacgccgccggatagctggcaagtggtctttgttgagcagaatctgccggacggcaagagcaataaaggccgcgtacaggcctatgatggccctatctacattgcggacgctgcgttgttcgttaaagccactcagccgcagttgggcatcagcgatccgtatcaactcaccgaagaacagtaccaggcggtgctgaaagtgctgcgcgatcaacacagtttgatccatcgctactggcatgacacgaccgtgcaaatgagcgatttcaaaaacgagggtgtggttgcttccagtgcctggccctatcaggccaacgccctgaaagccgaaggccagcctgtcgctaccgttttcccgaaagagggcgttaccggttgggctgacaccaccatgctacatagcgaagcgaaacatccggtttgcgcctacaaatggatgaactggtcattaacgccaaaagtgcagggcgatgtggcggcctggtttggctcgttaccagtagtgccggaagggtgtaaagccagtccgttattaggcgagaaaggttgtgaaacaaacggttttaactatttcgataaaatcgccttctggaaaacgcctatagcagaagggggcaagttttttccctacagtcgctggacgcaggattacattgccattatgggcggtcgc

SEQ ID NO: 640 - DNA, 1422 bp, Escherichia coli
atgcaacataagttactgattaacggagaactggttagcggcgaaggggagaaacagcctgtctataatccggcaacgggggaagttttactggagattgccgaggcatctgcagagcaggtcgatgccgctgttcgtgcagcagatgcagcatttgccgaatgggggcaaaccacgccgaaagcgcgtgcggaatgcctgctgaaactggcggatgtaatcgaagaaaatggtcaagtttttgccgaactggagtcccgtaactgtggcaaaccgctgcatagtgcgttcaatgatgaaattccggcgattgtcgatgtctttcgctttttcgccggagcagctcgctgcctgaatggtctggcggcaggtgaatatcttgaaggtcatacttcgatgatccgtcgcgatccgttgggggtcgtggcttcgatcgcaccgtggaattatccgctgatgatggctgcgtggaaactggctccggcgctggcggcagggaattgcgtagtgctcaaaccatcagaaattaccccgctgacagcgttgaagttggcagagctggcgaaagatatcttcccagctggcgtgattaacgtgctgtttggcagaggcaaaacggtgggcgatccgctgaccggacatcccaaagtacggatggtgtcactgacgggctctatcgccactggggaacacatcatcagccataccgcgccgtccataaagcttactcatatggaacttggaggcaaagcgccagtgatagtttttgatgatgcggatattgaagcggtggtcgaaggtgtacgtacttttggctattacaatgccggacaggattgtactgcggcttgtcggatctacgcgcaaaaaggtatttacgatacgctggtggaaaaactcggtgctgcagtggcaacgttaaaatctggtgcgccggatgacgagtctacggagcttggacctttaagctcactggcgcatctcgatcgcgtcagcaaagcagtagaagaggcgaaagcgacagggcacatcaaagtgatcactggcggtgaaaagcgcaagggtaatggctattactatgcgccgacgctactggctggcgcattacaggacgatgccatcgtgcaaaaagaggtatttggtccggtagtgagtgttacgctctttgacaatgaagaacaggtggtaaactgggcaaatgacagccagtacggacttgcatcctcggtatggacgaaagatgtgggcagggcgcatcgcgtcagcgcacggctacaatatggttgtacctgggtcaatacccatttcatgctggtaagtgaaatgccgcacggtgggcagaaactttctggttacggcaaggatatgtcactttatgggctggaggattacaccgtcgtccgccacgtcatggttaaacat

SEQ ID NO: 641 - DNA, 1683 bp, Escherichia coli
gtggctttgtcggtatcccgagcgaatggtggcacttcgaattaccccaggcagcgagttacccactactcgctgatcaattcacctgttttatatcccctggcacacagcacgccagttaatcaggaaactgtcatgaagagatcgattttgtttcgtcctacattgctcgcgatcgtccttgccacaacaatgccggttgcgcacgccgccgtaccgaaagatatgctggtgatcggtaaagctgccgacccacaaaccctcgacccagcggtgacaattgataataacgactggacagtgacctacccgtcttatcagcgactggttcagtacaaaacggacggtgataaaggctcaaccgacgttgaaggcgatctggcgagtagctggaaagcgtctgacgatcaaaaagagtggacattcaccctgaaggataatgctaaatttgccgatggcactcctgtcactgccgaagcagtaaaactctcttttgagcggttactaaaaatcggccaggggccagcagaagcatttcccaaagatttaaagattgatgctcccgacgaacatacagtgaggtttacccttagccagccattcgcaccgttcctctacacgctggcgaatgacggtgcatccattatcaatccggcggtcttaaaggagcatgcggcggatgatgcacgtggtttcctcgcgcaaaataccgctggctccggaccgtttatgctgaaaagctggcaaaaaggtcagcaattagttctggtgccaaatccgcattaccccggcaataaaccgaatttcaaacgggtatcggtaaaaattatcggtgaaagtgcttcccgtcgcctgcagctctcccgtggcgacattgacattgccgatgcgctgccggtggatcaactcaacgcactgaagcaggaaaacaaagtcaatgtggcagagtatccgtcactgcgcgtcacctatctgtatctgaataacagcaaagcgccacttaatcaggcggatctgcgtcgggccatttcctggtctaccgattatcagggtatggttaacggcattctgagtggtaacggaaaacaaatgcgcggcccgattccggaaggcatgtggggatacgatgcgacggcaatgcaatacaaccatgacgaaacgaaagccaaagccgaatgggataaagtgacgagcaaacccaccagcctgacgtttctctattctgataatgatccgaactgggagcctattgctctggcgacacaatccagtctcaacaagctgggcatcaacgtgaagctggaaaagctggcgaacgccaccatgcgcgacagagtgggaaaaggtgattatgacattgcgattggcaactggagtccggattttgccgacccgtatatgtttatgaattactggtttgagtcagacaaaaaaggtctgccgggtaaccgctcgttctatgaaaacagtgaggtcgataagttactgcgcaatgcgctagcgaccaccgaccagacgcagcgtactcgggactaccagcaggcacagaaaatcgtcattgatgacgctgcttatgtgtacctgttccagaaaaactaccaactggcgatgaacaaagaggtgaaaggttttgtgttcaatcccatgctggaacaggtcttcaatatcaataccatgagtaaa

SEQ ID NO: 642 - DNA, 4614 bp, Escherichia coli
atggcagataatctaaacccttcatcgcccctgccggacgtgttttcaccggcgacccgcgactggtttcttcgcgcctttaaacagccgaccgctgtccagtcgcaaacctggcatgtggcggcgcgaggcgaacatgcgctggtgattgcaccgactggctccgggaaaacgctggcagcatttctctacgccctcgatcagctcttccgcgaaggcggcgaagatacccgcgaggcgcataagcgtaaaacctcacgcatcctctatatttcaccgatcaaagctctgggcaccgacgttcagcgcaacttgcagatcccgttacagggtattgccgatgaacggcggcggcgcggcgaaacggaagtcaatcttcgcgtggggatccgtactggcgatacgcctgcacaggaacgcagcaaactcacccgtaatccgccggatattctgatcaccacacccgaatcactctatctgatgctgacctcccgcgcgcgcgaaacgctacgcggcgtcgaaacggtaattattgatgaagtccacgcggtagcgggcagtaaacgtggtgcgcatctggcgttaagtctggagcggctcgatgcgctgctccacacctcagcacagcgaattggcctttctgccactgtacgctcagccagcgatgtggcagcatttcttggtggcgatcgcccggttacggtagtcaacccgcccgcaatgcgccatccgcagatacggattgtcgtaccggtcgccaatatggatgatgtctcatcggtcgccagcggcaccggcgaagacagccatgccggccgggaaggctccatctggccatatattgaaacgggtatccttgatgaagttttgcgccatcgctcgaccattgtctttactaattcacgcgggctggcggaaaaactgacggcacgattgaatgagctttacgccgcacgcttacagcgctccccgtctatcgccgttgatgcggtccatttcgagtcgacctccggcgcaacctctaaccgtgtacaaagtagcgacatttttattgcccgctcacaccacggctccgtctctaaagaacaacgagcaatcaccgaacaggcgctgaaatcgggtgaattacgctgcgtggtcgcaacctccagtctcgaactggggattgatatgggcgcggtggatctggtgattcaggtggcaacgccgctttctgttgccagagggttacaacgcattggacgtgccggacaccaggtaggtggtatctccaaagggctttttttcccccgaacccggcgtgacttagtcgattccgcagtcattgttgagtgtatgttcgcaggcaggctggaaaacctgacaccaccgcataatccactcgacgtccttgcgcagcaaaccgttgccgccgcgtcgatggatgcattacaggcagacgaatggtactcccgcgtacgccgtgccgcaccgtggaaagatctgccaagacgtgtttttgacgccacgctggatatgctttccgggcgctatccctctggcgatttttctgcttttcgaccaaaactggtctggaacagggagaccgggatattgaccgcccgacctggcgctcagctgttggcggttaccagcggtggcaccattccggatcgtggcatgtatagcgtgttattacccgaaggtgaagaacaggccggttcgcggcgggtgggtgaactggatgaggagatggtatatgagtcgcgggtgaacgacattatcactctcggcgctacctcatggcggatccagcaaatcacccgcgatcaggtgattgtgactcctgctccgggtcgttctgcccggctccccttctggcgtggtgaaggtaacggacgtccggcagaattaggcgagatgatcggcgattttctccatttactggcggatggcgcgttcttttccgggactattcccccgtggttggcagaagaaaatacgatcgccaatattcaggggttgattgacgagcagcgcaacgcgacgggcatcgttccggggagtcgtcatctggtcctcgaacggtgccgtgatgaaattggcgactggcgtattattttgcactctccctatggaagacgggtgcatgaaccctgggcgctggcgattgccgggcgaatacatgcactatggggcgctgacgcgtctgtggtcgccagtgatgacggcattgttgcgcgcattcctgacactgatggtaaattgcccgacgccgcgatttttttgtttgaaccagaaaagttgctacaaattgtccgtgaggcggtaggcagctcggcacttttcgccgcccgttttcgcgaatgcgccgcgcgggcattattaatgccgggccgcacgccgggccatcgcaccccgctctggcaacaacggctgcgcgccagtcagttgctggaaatcgctcagggatatccggattttccggtcattctcgaaaccctacgcgaatgtctgcaagatgtttatgatcttcccgcgctggaacgtttgatgcgtcgcctgaacggtggcgaaattcaaatatccgatgtaacgaccacaacgccctcgcctttcgccgccagtttattgttcggctatgtcgcggaatttatgtaccagagcgacgccccgctggcagagcgccgggcatccgtactgtcgctggacagcgagttactgcgcaatctactcggacaggtcgatccgggggaattactcgacccacaggtcattcgccaggtggaagaagagttgcaacgactggctcctggcagaagagcgaaaggtgaagaaggattgttcgacctgctgcgcgaactggggccaatgaccgttgaagacctggcgcaacgacatacaggcagcagtgaagagattgcgtcgtatctggaaaatcttcttgcagtaaaacgaatcttcccgaccatgattagcgggcaggagcgtcttgcctgtatggatgatgccgccaggctgcgcgatgctctcggcgtacgactaccagagtcactgccagagatttatttgcaccgagtcagttacccgcttcgcgacctctttctgcgctatctccgggctcatgctctggtcacgtctgaacaactggctcatgagtttagtctcggtattgccattgtcgaagagcaacttcagcaactgcgcgaacaggggctggtgatgaatctgcaacaagacatctgggtgagcgatgaagtatttcgtcgtctgcgtttgcgctcgctgcaagccgccagagaagcgacacgtcccgttgcggccacgacctatgcgcgattgctgctggaacgtcagggcgtattacccgccaccgatggtagcccggcactctttgcctcaacatcgccaggcgtttatgagggcgtggatggcgtgatgcgggtgatcgaacagcttgctggcgttggtttacccgcctcactctgggaaagccagatcctgcctgcccgcgtacgcgactattcgccagaaatgctcgatgaattactggcaaccggtgcggttatctggtcggggcaaaaaaagctgggtgaagatgacggtctggtggcactgcatctacaggaatatgccgcagaatcgttcactcccgccgaagcagatcaggcgaatcgttcggcgctgcagcaagcgataatcgctgttctggctgacggaggagcctggtttgcacaacaaatcagccaacggatacgcgataaaatcggcgaatcggttgatccctcggctctgcaagaggcgttatgggcgctggtctggcaaggcgtcattaccagcgacatttgggcaccgttacgcgccctcacccttagcagttccaacgcacgcacctcgactcgccgcagtcaccgggctcgtcgtgggcgtcctgtctatgcgcaacccgtctcgccgctggtatcttacaacacaccaaagctggccggacgctggtcgttattgcaggtggagccactaaacgataccgaaaggatgctggcgctggcggaaaatatgctcgaccgctacggcatcatcagtcgtcaggcggtgatagccgaaaatatccctggcggttttccatcgatgcaaacgctttgtcgaagtatggaagactccgggcgaattatgcgaggtcgttttgtagaaggtctgggtggcgcgcaattcgctgaacgtctgactattgaccgattgcgcgatctggcgacacaaaccacgcaaacgcgccactatacaccagtggcgctctctgccaacgatccggctaatgcatggggaaatcttctgccctggcctgcacatccggcaacgctgattccaacgcgtcgggcgggtgcgctggtggtcgtttctggcggaaaattgttactctatctggcgcaaggtggcaaaaaaatgctggtctggcaggaaaaagaggaattactcgccccagaggttttccacgcgctgactaccgcactgcgtcgcgaaccacggctgcgctttacgctaacagaagtgaatgacctaccggtccggcaaacgccgatgtttacgctgctgcgtgaggcgggattttcaagttcgccacaagggctggattgggga

SEQ ID NO: 643 - DNA, 741 bp, Escherichia coli
atgttaagtattaaagatttacacgtcagcgtggaagataaagctatcctgcgtggattaagcctcgacgttcgtcccggcgaagtgcacgccattatggggccaaacggttctggcaaaagtaccttatcggcaacgcttgccgggcgagaagattatgaggtgacgggcggcacggttgagttcaaaggcaaagatttgcttgcgctgtcgccggaagatcgtgcaggtgaaggcatctttatggccttccagtatccggtggaaattcccggcgtcagtaaccagtttttcctgcaaacggcacttaatgcggtgcgcagctatcgcggccaggaaacgctcgaccgctttgattttcaggatttgatggaagagaaaatcgctctcctgaagatgccggaggatttattaacccgttcggtaaacgttggtttttccggcggcgagaaaaagcgcaacgatattttgcaaatggcggtgctggaaccggagttatgcattcttgatgagtcggactccggcctggatattgacgcattaaaagtggttgccgatggcgtgaactcgctgcgtgacggcaagcgttcattcatcattgttacgcactaccaacgcattctcgactacatcaagcctgattacgtccatgtgctgtatcagggacgaattgtgaaatccggcgatttcacgttggtcaaacaactggaggagcagggttatggctggcttaccgaacag

SEQ ID NO: 644 - DNA, 2301 bp, Escherichia coli
atgaccgagttcgacctgacgcgcattctgacgggttcagaagggacgctggcctttattaccgaagcgcggctggatattacgcccttgcctaaagtgcgccgtctggtgaacgtcaaatatgactcttttgactccgcgctgcgtaacgcgccgtttatggttgaggcgcgggcgctttcggtagagacggtggactcaaaagtgctgaatctggcgcgggaagatattgtctggcattccgtcagcgagttgattaccgatgtgcctgacaaagagatgctcgggctgaacattgtggaatttgctggtgatgatgaggcgctgattgacgagcgagttaatgcactctgtgtgcggcttgatgagctgattgccagccaacaggcgggggtgattggctggcaggtgtgccgcgatctggcgggtgttgaacgtatctatgcgatgcgcaaaaaagctgtcggcctgctcggtaatgccaaaggagcagccaagccaattccgtttgctgaggatacctgcgtaccgccggaacatttggccgattatattgctggatttcgcgcgctgcttgacagccacggcttaagctacggtatgttcggtcacgtcgacgcaggtgtcctgcacgtccgtcctgcgctggatatgtgcgatccgcaacaagagattttgatgaagcaaatctctgatgacgtagtggcgcttaccgcgaaatacggtggtttgttgtggggcgaacacggcaaaggttttcgtgccgaatacagcccggcgtttttcggtgaggaactttttgcagaactgcgtaaagtgaaagcggcatttgacccgcataaccgactcaacccagggaagatttgcccgccagaaggtctcgatgcaccgatgatgaaagtggacgcggtgaagcgcggtacattcgaccggcagatccccattgcggtacgccagcagtggcgtggtgcgatggagtgtaacggcaacggtttatgcttcaactttgatgcccgcagtccgatgtgtccgtcgatgaagatcacccagaaccggattcattcaccgaaaggacgcgcaacgctggtgcgtgagtggctacgtttgttggcagatcgcggcgttgacccactcaaactggaacaagaactgcctgaatccggcgtcagtttgcggacgttaattgcccgcacgcgcaatagctggcatgcgaataaaggcgaatatgacttctcacacgaagtcaaagaggcaatgtcgggctgtctggcctgtaaagcgtgttcgacccagtgccccatcaaaattgatgtgccggagtttcgctctcgttttctgcagctctatcacacccgttatttacgcccgctgcgcgaccacctcgtcgctacggtcgagagctacgcgccgctgatggcacgcgcgccgaaaacctttaacttcttcattaaccagccgctggtgcgcaaactctcggaaaaacatattggcatggttgatttgccgctgctgtcggtcccctcgctgcaacaacaaatggtggggcatcgctcggcaaacatgacgctggaacagcttgaagctctcaatgcagagcagaaagcgcgcacggtgttggtggtgcaggacccctttaccagctattacgatgcgcaagtggtggcggattttgtccgtctggtcgaaaaattaggtttccagcctgtgttactgccattttcgccaaatggcaaagcccagcatatcaaaggctttcttaatcgttttgcgaagacggcgaaaaagacggcggatttcctcaaccgtgtggcgaagctggggatgccaatggtgggcgtcgatccggcgctggtactttgttatcgcgatgaatataaactggcgctgggcgaggaacgtggcgagtttaacgtcttactggcgaatgaatggctcgcaagcgcacttgagtcacagccagtggctacagtcagcggtgaatcatggtatttctttggtcactgtaccgaggttaccgccttgccgggcgcgccagcacaatgggccgcgatatttgcccgttttggcgcgaaactggaaaatgtcagcgtgggttgctgcggcatggcagggacttacggacatgaagcgaaaaaccataaaaattcgctcgggatctatgagttatcctggcatcaggcgatgcagcgactgccgcgtaatcgctgtctggcgaccggatattcctgccgtagccaggtaaaacgggtcgaaggcacgggggtacgccatcctgtgcaggctttactggagattattaaa

SEQ ID NO: 645 - DNA, 1341 bp, Escherichia coli
atggatcagacatattctctggagtcattcctcaaccatgtccaaaagcgcgacccgaatcaaaccgagttcgcgcaagccgttcgtgaagtaatgaccacactctggccttttcttgaacaaaatccaaaatatcgtcagatgtcattactggagcgtctggttgaaccggagcgcgtgatccagtttcgcgtggtatgggttgacgatcgcaaccaggtacaggtcaaccgtgcatggcgcgtgcagttcagctccgccatcggcccgtacaaaggcggtatgcgcttccatccgtcagttaacctctccattctcaaattcctcggcttcgaacaaaccttcaaaaatgccctgactaccctgccgatgggcggtggtaaaggcggtagcgattttgacccgaaaggtaaaagcgaaggcgaagtgatgcgtttctgccaggcgctgatgactgaactgtatcgccacctgggcgcggataccgacgttccggcaggtgatatcggcgttggtggtcgtgaagtcggctttatggcggggatgatgaaaaagctctccaacaataccgcctgcgtcttcaccggtaagggcctttcatttggcggcagtcttattcgcccggaagctaccggctacggtctggtttatttcacagaagcaatgctaaaacgccacggtatgggttttgaagggatgcgcgtttccgtttctggctccggcaacgtcgcccaatacgctatcgaaaaagcgatggaatttggtgctcgtgtgatcactgcgtcagactccagtggcactgtagttgatgaaagcggattcacgaaagagaaactggcgcgtcttatcgaaatcaaagccagccgcgatggtcgagtggctgattacgccaaagaatttggtcttgtctatctcgaaggccaacagccgtggtctgtaccagttgatatcgccctgccttgcgccacccagaacgaactggatgttgacgccgcgcatcagcttatcgccactggcgttaaagccgtcgccgaaggggcaaatatgccgaccaccatcgaagcgactgaactgttccagcaggcaggcgtactgtttgcaccgggtaaagcggctaatgctggcggtgtagcaacatcgggcctggaaatggcgcaaaacgctgcgcgcctgggctggaaagccgagaaagttgacgcacgtttgcatcacatcatgctggatatccaccatgcctgtgtcgagcatggtggtgaaggtgagcaaaccaactacgtgcagggtgcgaacattgccggttttgtgaaggttgccgatgcgatgctggcgcagggtgtaatt

SEQ ID NO: 646 - DNA, 969 bp, Escherichia coli
gtgaccattgctattgttataggcacacatggttgggctgcagagcagttgcttaaaaccgcagaaatgctgttaggcgagcaggaaaacgtcggctggatcgatttcgttccaggtgaaaatgccgaaacgctgattgaaaagtacaacgctcagttggcaaaactcgacaccactaaaggcgtgctgtttctcgttgatacatggggaggcagcccgttcaatgctgccagccgcattgtcgtcgacaaagagcattatgaagtcattgcaggcgttaacattccaatgctcgtggaaacgttaatggcccgtgatgatgacccaagctttgatgaactggttgcgctggcagtagaaacaggccgtgaaggcgtgaaagctctgaaagccaaaccggttgaaaaagccgcgccagcacccgctgccgcagcaccaaaagcggctccaactccggcaaaaccaatgggaccaaacgactacatggttattggccttgcgcgtatcgacgaccgtctgattcacggtcaggtcgccacccgctggaccaaagaaaccaatgtctcccgtattattgttgttagtgatgaagtggctgcggataccgttcgtaagacactgctcacccaggttgcacctccgggcgtaacagcacacgtagttgatgttgccaaaatgattcgcgtctacaacaacccgaaatatgctggcgaacgtgtaatgctgttatttaccaacccaacagatgtagagcgtctcgttgaaggcggcgtgaaaatcacctctgttaacgtcggtggtatggcattccgtcagggtaaaacccaggtgaataacgcggtttcggttgatgaaaaagatatcgaggcgttcaagaaactgaatgcgcgcggtattgagctggaagtccgtaaggtttccaccgatccgaaactgaaaatgatggatctgatcagcaaaatcgataag

SEQ ID NO: 647 - DNA, 1662 bp, Escherichia coli
atggcacaagtcattaataccaacagcctctcgctgatcactcaaaataatatcaacaagaaccagtctgcgctgtcgagttctatcgagcgtctgtcttctggcttgcgtattaacagcgcgaaggatgacgccgcaggtcaggcgattgctaaccgttttacttctaatattaaaggcctgactcaggctgcacgtaacgccaatgacggtatttctgttgcacagaccactgaaggcgcgctgtccgaaatcaacaacaacttacagcgtattcgtgaactgacggttcaggccactacagggactaactccgattctgacctggactccatccaggacgaaatcaaatctcgtctggacgaaattgaccgcgtatccggtcagacccagttcaacggcgtgaacgtgctgtccaaagatggttcaatgaaaattcaggtcggcgcaaatgatggtgaaaccatcacgattgatctgaagaaaattgactctgatacgctgaatctggctggttttaacgtgaatggcgaaggtgaaacagccaatactgctgcaacacttaaagatatggttggtttaaaactcgataatacgggggtcactacagctggagttaatagatatattgctgacaaagccgtcgcaagtagcacggatattttgaatgcggtagctggtgttgatggcagtaaagtttccacggaggcagatgttggttttggtgcagctgcccctggtacgccagtggaatatacttatcataaagatactaacacatatacggcttctgcttcagttgatgcgactcaactggcggcattcctgaatcctgaagcgggtggtaccactgctgcaacagtaagtattggcaacggtacaacagctcaagagcaaaaagtcattattgctaaagatggttctttaactgctgctgatgacggtgccgctctctatcttgatgatactggtaacttaagtaaaactaacgcaggcactgatactcaagctaaactgtctgacttaatggcaaacaatgctaatgccaaaacagtcattacaacagataaaggtacatttactgctaatacgacaaagtttgatggggtagatatttctgttgatgcttcaacgtttgctaacgccgttaaaaatgagacttacactgcaactgttggtgtaactttacctgcgacatatacagtcaataatggcactgctgcatcagcgtatttagtcgatggaaaagtgagcaaaactcctgccgagtattttgctcaagctgatggcactattactagtggtgaaaatgcggctaccagtaaagctatctatgtaagtgccaatggtaacttaacgactaatacaactagtgaatctgaagctactaccaacccgctggcagcattggatgacgctatcgcgtctatcgacaaattccgttcttccctgggtgctatccagaaccgtctggattccgcagtcaccaacctgaacaacaccactaccaacctgtctgaagcgcagtcccgtattcaggacgccgactatgcgaccgaagtgtccaacatgtcgaaagcgcagatcattcagcaggccggtaactccgtgctggcaaaagccaaccaggtaccgcagcaggttctgtctctgctgcagggt

SEQ ID NO: 648 - DNA, 666 bp, Escherichia coli
atgtgtggacgctttgcccaatcccaaacgcgtgaagattaccttgcgcttctcgcggaagatattgaacgcgatattccctacgatcccgaacccattggcagatacaacgtcgcgccgggaaccaaagttcttctgctcagtgaacgtgatgaacaccttcatctggatccggttttctggggatatgctcccggatggtgggataaaccgccgctgattaacgcccgcgtagaaactgccgcaaccagtcgcatgtttaaaccgctctggcaacacggtcgggcaatctgttttgccgatggctggtttgagtggaaaaaagaaggcgacaaaaagcagccttattttatctatcgtgctgatggacaacctgtttttctggccgcgataggcagcacaccgttcgagcgtggtgacgaagccgaaggatttttgatcgtcactgcagcagcagaccaaggtctggtagatattcatgaccgccgcccgctggtactgtcgccagaagctgcgcggaaatggatgcggcaagagattggcggtaaagaagcctctgaaatcgctaccagtggctgtgtgccagcaaaccagttcacctggcacccggtatcgcgcgcggtgggtaatgttaaaaaccagggcgcggagttaattcaacctatc

SEQ ID NO: 649 - DNA, 318 bp, Escherichia coli
atgaaaatgtcagcgatacaggggattgaaggggttatcagccagttacagaccacggcgatgagtgcgcgtgcgcaggaatcactgccgcaaccgaccattagttttgccgggcagctgcacgccgcgctcgatcgcataagcgatacacaaacagccgcccgcacgcaggcagaaaaattcactctcggtgaacccggcgtggcgttaaacgatgtgatgaccgatatgcaaaaagcctcagtttcaatgcaaatggggattcaggtgcgtaataagctggtggcggcgtatcaggaagtgatgagcatgcaggtg

SEQ ID NO: 650 - DNA, 1416 bp, Escherichia coli
atgcaggaaaatatatcagtaaccgattcatacagcaccgggaatgccgcacaggcaatgctggagaaactgctgcaaatttatgatgttaaaacgctggtggcgcagcttaatggtgtgggtgagaatcactggagcgcggcaattttaaaacgtgcgctggcgaatgactcggcatggcaccgtttaagtgagaaagagttcgcccatctgcaaacgttgttacccaaaccaccggcacatcatccgcattatgcgtttcgctttatcgatctatttgccggaattggcggcatccgtcgcggttttgaatcgattggcggacagtgcgtctttaccagcgaatggaacaaacatgcggttcgcacttataaagccaaccattattgcgatccggcgacgcatcattttaatgaagatatccgcgacatcaccctcagccataaagacggcgtgagtgatgaggcggcggcggaacatattcgtcaacacattcctgaacacgatgtattactggccggttttccttgtcagccattttcgctggctggcgtatcgaaaaagaactcgctcgggcgggcgcacggttttgcctgtgatacccagggcacgctgttctttgatgtggtgcgcattatcgacgcgcgtcgtccggcgatgtttgtgctcgaaaatgtcaaaaacctgaagagtcacgataagggaaaaacgttccgcatcatcatgcagacgctggacgaactgggctatgacgttgccgacgcagaagataacgggtcggacgatccgaaaatcatcgacggcaaacattttctgccgcagcaccgtgaacgcatcgtgctggtgggttttcgtcgcgatctgaatctgaaagccgattttactctgcgtgatatcagcgaatgtttccctgcgcagcgagtgacgctggcccagctgctggacccgatggtcgaggcgaaatatatcctgacgccggtgctgtggaagtacctctatcgttatgcgaaaaaacatcaggcacgcggtaatggcttcggttatggaatggtttatccgaacaatccgcaaagcgtcacgcgtacgttgtctgcgcgttattacaaagatggcgcggaaattttaatcgatcgcggctgggatatggccacgggtgagaaagattttgacgatccgctgaatcagcaacatcgtccacgtcggttaacgcctcgggaatgcgcgcgcttaatgggttttgaagcgccgggagaagcgaaattccgcattccggtttcggacactcaggcctatcgccagttcggtaattcggtggtcgtgccggtctttgccgcggtggcaaaactgcttgagccaaaaatcaaacaggcggtggcgttgcgtcagcaagaggcacaacatggccgacgttcacga

SEQ ID NO: 651 - DNA, 177 bp, Escherichia coli
agaactcccgtgacggcaaccctcgaaaatggcgattcgatgcaacaaacagtgaactatgtgccgaacgtcacgaatgctgaaatcacgctggcagcctcgaaggacccggtgattgccgacaataacgatctcacgacactaacagcaccgtcgctgatacagagggcaatgcaa

SEQ ID NO: 652 - DNA, 2196 bp, Escherichia coli
gtgggcgcaggcattgaacgcagagcaggtataagaatgacagaaaaagtaaaacaacatgccgctccggtaacgggcagtgatgaaatcgatattggtcgcctggtcggcaccgtcattgaagcgcgctggtgggtaattggcatcaccgccgtattcgccctctgtgccgtggtttacaccttcttcgccacgccgatatacagcgccgacgcactggtacaaatcgaacaaagcagcggcaattcgctggtgcaggatattggctctgcattagccaacaaaccgcctgcatcggacgccgagatccagttgattcgttcgcgtctggtgcttggtaaaacggtggacgatctcgacctcgatattgcagtgagcaaaaacacgttcccgattttcggtgcgggctgggatcgcctgatgggacgccagaacgagacggtaaaagtgaccacctttaaccgcccgaaagagatggcggatcaggtgtttacgcttaatgtgctggacgataaaaactacactctgagcagcgatggcggctttagcgcccgtgggcaagcgggccagatgctgaaaaaagaaggcgtcacgctgatggttgaagctattcacgcccgcccgggcagtgagtttaccgtcaccaaatactccacgctggggatgatcaatcaactgcaaaacagcctgacggtaacggagaacggcaaagacgcaggcgtcctgagcctgacttataccggtgaagatcgtgaacagatccgcgacattcttaacagcatcgctcgtaactatcaggaacaaaatattgagcgcaaatcggcggaagcgtcgaaaagcctcgctttcctcgcgcaacagttaccggaagtacgtagccgcctcgatgttgccgaaaacaaactgaatgccttccgtcaggataaagattctgttgatctgccgctggaagcgaaagcggtgctcgattcgatggtgaacatcgacgcgcagttgaacgaactgacctttaaagaagcggaaatctccaagctgtacaccaaagttcacccggcgtatcgcacgctgctggagaaacggcaggcgctggaagacgaaaaagccaaacttaacggtcgcgtaacggcgatgccgaaaacccagcaggaaattgtccgtctgacccgcgatgtcgagtctgggcagcaggtctatatgcaactgctgaataaagaacaggagctgaaaatcaccgaagccagcaccgtcggcgatgtgcgcattgttgacccggcaatcacccagcctggtgtgctgaaaccgaagaaagggctgattatcctcggggcgattatcttcggcctgatgctctctatcgtgggtgtgctgctgcgctctttgttcaatcgcggcattgaaagcccgcaggtgctggaagaacatggcatcagcgtctatgccagcatcccgctgtcggagtggcagaaagcgcgcgatagcgtcaaaaccatcaaaggggttaaacgctataaacagagccagctactggcggtggggaatccaaccgatctggcgattgaagccatccgtagtctgcgtaccagtctgcacttcgcgatgatgcaggcacagaacaatgtgttgatgatgaccggggttagcccgtcaatcggtaaaacctttgtctgcgccaacctggcggcggtgatcagccagaccaataaacgggtgttgttgatcgactgcgatatgcgcaaaggctacacccacgagctgttgggcactaataacgttaatggtctgtcggaaattctgattggtcagggcgatattactaccgctgctaaaccgacctctattgccaaatttgacctgatcccgcgcggtcaggtgccgccaaatccttctgaactgttgatgagcgaacgctttgccgaactggtgaactgggcgagtaaaaactacgacctggtgttgattgatacgccgccgattctggcagtgaccgatgcggcaattgttggtcgtcatgttggaaccacgttaatggtggcgcgttatgcggtcaacacattgaaagaagtggaaaccagtctgagccgctttgagcaaaacggtattccggtgaaaggggtgattctgaactccatcttccgccgcgccagcgcgtatcaggattatggctattacgaatacgaatataagtcggatgcgaaa

SEQ ID NO: 653 - DNA, 2367 bp, Escherichia coli
atgcttatggcaaactacggtttttgcactattttcgctgcctcgtcgggcaacagaggaagaaaaatccatatgaaatggctatgttcagtaggaatcgcggtgagtctggccctgcagccagcactggcagatgatttattcggcaaccatccattaacgcccgaagcgcgggatgcgttcgtcaccgaactgcttaagaaaatgacagttgatgagaaaattggtcagctgcgcttaatcagcgtcggcccggataatccgaaagaggcgatccgcgagatgatcaaagacggtcaggttggggcgattttcaacaccgtaacccgtcaggatatccgcgccatgcaggatcaggtgatggaattaagccgcctgaaaattcctcttttctttgcttacgacgtgctgcacggtcagcgcacggtgttcccgattagcctcggcctggcctcgtcttttaacctcgatgcggtgaaaacagtcgggcgtgtctctgcttatgaagcggcagatgatggcctgaatatgacctgggcaccgatggtcgatgtctcgcgcgatccgcgctggggacgtgcttccgaaggttttggcgaagatacgtatctcacttcaacaatgggtaaaaccatggtggaagcgatgcagggtaaaagtccggcagatcgctactcggtgatgaccagcgtcaaacactttgccgcatacggtgcggtagaaggcggtaaagagtacaacaccgtcgatatgagtccgcagcgcctgtttaatgattatatgccgccgtacaaagcggggctggacgcaggcagcggcgcggtgatggtggcgctgaactcgctgaacggcacgccagccacctccgattcatggctgctgaaagatgttctgcgcgaccagtggggctttaaaggcatcaccgtttccgatcacggcgcaatcaaagagctgattaaacatggcacggcggcagacccggaagatgcggtgcgcgtggcgctgaaatccggcatcaacatgagtatgagcgacgagtactactcgaagtatctgcctgggttgatcaaatccggcaaagtgacgatggaagagctggatgacgctacccgtcatgtactgaacgttaaatatgatatggggttgtttaacgacccatacagccatttggggccgaaagagtctgacccggtggataccaatgccgaaagccgcctgcaccgcaaagaagcgcgtgaagtggcgcgtgaaagcctggtgttgctgaaaaaccgtctcgaaacgttaccgctgaaaaaatcggccaccattgcggtggttgggccactggcggacagtaaacgtgacgtgatgggcagctggtccgcagccggtgttgccgatcaatccgtgaccgtactgaccgggattaaaaatgccgtcggtgaaaacggtaaagtgctgtacgccaaaggggcgaacgtcaccagtgacaaaggcattatcgatttcctgaatcagtatgaagaggcggtcaaagtcgatccgcgttcgccgcaagagatgattgatgaagcggtgcaaaccgcgaaacaatctgatgtggtggtggctgtggtcggtgaagctcaggggatggcgcacgaggcctccagccgtaccgatattactattccgcaaagccaacgtgacttgattgcggcgttgaaagccactggtaaaccgctggtgctggtgctgatgaatgggcgtccgctggcgctggtgaaagaagatcagcaggctgatgcgattctggaaacctggtttgcgggtacggaagggggtaatgcgattgccgatgtattgtttggcgattacaacccgtccggtaagctaccgatgtccttcccgcgttctgtcgggcagatccctgtgtactacagccatctgaataccgggcgtccgtataatgccgacaagccgaacaaatacacttcgcgttattttgatgaagctaacggggcgctgtatccgttcggttatggtctgagctacaccactttcaccgtctctgatgtgaaactttctgcgccgaccatgaagcgtgacggcaaagtgaccgccagtgtgcaggtgacgaacaccggtaagcgcgaaggggcgacggtagtgcagatgtacttgcaggatgtgacggcttccatgagtcgtccggtgaagcagctgaaaggctttgagaaaatcaccctgaaaccgggcgaaactcagaccgtcagcttcccgattgatatcgaggcgctgaagttctggaatcaacagatgaaatatgacgccgagcctggcaagttcaatgtcttcatcggcactgattccgcacgcgttaagaaaggcgagtttgagttgctg

SEQ ID NO: 654 - DNA, 2589 bp, Escherichia coli
atgcatcaatctggttctgtttctctttgtcgttccgcaatatctgttctggtggctacagcgttatattcacccatagcattggcatcaactgttgagtatggtgagacagttgatggtgttgtcctggaaaaagatatccagctggtttatgggaccgccaataatacgaaaatcaatcctggcggagaacagcatataaaagaatttggtgtaagtagtaatactgaaattaacggagggtatcagtacattgaaatgaatggcaccgcagaatactcagtattaaatgacggttatcaaattgttcaaatgggtggcgcggcaaaccagactacccttaataatggtgtgctacaggtttatggcgcagcgaatgataccaccattaaaggcgggcgcttaattattgaaaaagatgggattaccgtctttgccgctatcgaaaagggaggattactggaggttaaagaggggggattagcatttgcggtagatcagaaagccggcggtgcgattaaaacaaccacgcgggccatggaggtattcggaacaaaccgtctcggtcagttcgatatcaaggatggtattgctaataatatgctgttggaaaacggcggaagtttgcgagttgaagaaaatgacttcgcttataataccactgtggatagtggcggcttactggaggttatggatggcgggactgcaactggcgttgataaaaaagcaggcggacaattaattgtctcaacgaatgcgctggaagtgagtggtacaaacagtaaaggccaatttagtataaaagatggtgtgtcaaaaaattatgaactggatgatggttccgggctcattgttatggaggacacgcaggccattgatactatccttgatgagcatgccactatgcaatcgctgggaaaggatactggtacgagagtgcaggcaaatgcggtatatgatctcggtcgatcagatcagaatggaagtataacgtattcctctaaagccatctctgaaaatatggttatcaacaatggtcgcgctaatgtctgggctggcacaatggttaacgtttcagtcagagggaatgatggcattcttgaggtcatgaagccgcaaataaattatgcacccgctatgttggtgggtaaggtcgtggtttctgagggcgcttcttttagaacgcatggtgccgtggataccagcaaagcggatgtttcgctcgaaaatagcgcatggaccatcattgccgataacagtacgacgaaccaaaacactcgcctcaacttagccaaccttgcgatgtccggcgcaaatgtgattatgatggctgagccagtgactcgttcatcagtgacggcaagtgcggaaaatttcattacgttgaccaccaataccctgtcgggaaacggcaatttttatatgcgtaccgatatggctaatcatcagagcgatcagctcaacgtcaccggtcaggcaacaggtgatttcaaaatattcgtgacggacaccggtgccagcccggcagcaggagatagccttacactggtaacaacgggcggcggtgatgctgcatttacgttgggcaatgccggaggcgttgttgatatcggtacgtatgaatataccttgctggataatggcaaccatagctggagtctggcagagaatcgcgcgcaaattaccccttcaaccactgatgtgctgaatatggcggcagcacaaccgctggtatttgatgcagaactggacaccgtgcgtgagcgtcttggtagcgtaaaaggcgttaattacgatacggcgatgtggagttcggcaattaacacccgcaacaacgtgaccactgatgcgggagctggctttgagcaaacattgacgggcctgacgctcggtatcgatagccgtttctcccgtgaagaaagcagcacaattcgcggcttgttctttggttactctcattctgatattggttttgatcgcggcggcaaaggcaatatcgatagctacaccctgggggcttatgccggttgggagcatcagaacggtgcctatgttgatggagtggtgaaagttgaccgttttgccaacaccatccatggcaagatgagtaatggggcaacagcgtttggcgattacaatagtaacggcgcgggtgctcatgtcgagagcgggttccgttgggttgacggattgtggagtgttagaccctatctggcctttaccggctttaccactgatggtcaggactacacgttatcaaacggcatgcgcgcggatgtgggaaatacccgcatattacgggctgaagcgggaacggcggtaagctatcacatggacctgcaaaacggtacgacgctggaaccctggctgaaagccgccgtgcgtcaggaatacgccgattctaaccaggtgaaagttaatgacgatggcaaatttaataatgatgtggctggaaccagtggcgtttatcaggctgggataaggtcatcgtttaccccgacgttaagcggtcatttgtctgtcagttatggcaatggcgcaggggtagaatcgccgtggaatactcaggcgggtgtggtctggacgttc

SEQ ID NO: 655 - DNA, 1053 bp, Escherichia coli
atggaaataagctttacccgcgtggcactgctggctgccgcgctcttctttgttggttgcgatcaaaaaccacaacccgccaaaacccacgctactgaagttatcgttcttgaaggcaaaaccatgggtaccttctggcgtgccagcattccgggcattgacgccaaacgcagtgccgaacttaaagaaaagattcagacccagctggacgccgacgatcagctgctttcgacctataaaaaagattccgcgctgatgcgatttaacgactcgcaaagtttatcgccgtggccggtaagtgaagcgatggccgatatcgtcaccacctcgctgcgcattggcgcaaggaccgatggtgcgatggatataaccgtcgggccgctggtgaatctgtggggctttggcccggaacaacagccgattcaaattccgagccaggaacagatcgatgcgatgaaagccaaaaccggcttacagcacctgacggtgattaatcagtcccaccagcaatatctgcaaaaagacctgccggatttatatgtcgatctctctaccgtcggtgaaggttatgcggcggatcacctggcacgcttgatggagcaggaagggatttcccgctatctggtgtcggtgggcggcgcgctgaacagccgtggtatgaacggtgcaggccagccgtggcgggtagcgattcaaaaaccaaccgataaagaaaacgcggttcaggccgtggtggatatcaacggtcatgggattagtacctctggcagctaccgtaactattacgaactggacggcaaacgtctttctcatgttatcgatccgcaaaccgggcgtcccatcgaacacaatctggtatccgtgacggtgattgctccgacggcgctggaagccgatgcctgggatactggcttgatggtactggggccggagaaagccaaagaggttgttcgtcgggaagggctggcggtttatatgatcaccaaagagggcgataattttaaaacctggatgtcgccgcagtttaaaagcttccttatcagcgaaaaaaat

SEQ ID NO: 656 - DNA, 4617 bp, Escherichia coli
atggaaggacacccgatggatacccaacgattccaatcccaatttcattggcatttatcgtttaaattttctggcgcgatagcagcgtgcttgtccctgtctcttgtgggaacagggcttgctaatgctgatgattcgcttccttccagcaactatgcgccgcccgccgggggaacattctttttgctcgctgacagcagttttagcagcagtgaagaggcgaaagtgcgactggaagcgccggggcgtgattatcggcgctatcagatggaagagtacggcggtgtggacgttcgtctgtatcgtattcctgacccgatggcatttttgcgccagcagaaaaatctgcatcgcattgtggtgcaaccgcaatatctgggcgacgggctgaacaatacgctgacctggctgtgggataactggtacggcaaatctcgccgcgtgatgcagcgtactttttcttctcagtctcggcagaatgtgactcaggcgttacccgaattacagctcggcaatgccattattaaaccttcccgttatgtacagaacagccagttttcaccgctgaaaaaatatccactggtggaacagttccgttacccactatggcaggctaaaccggtcgagccgcagcaaggggtaaaactggaaggcgcatccagcaatttcatctcgccgcagccgggtaacatctatattcctctcggcaaacaagagccgggactgtacctcgtcgaggcgatggtcggtggatatcgggcgacgacggtggtatttgtctctgataccgtggcgcttagcaaagtgtcgggtaacgagctcctggtgtggaccgcgggtaaaaaacagggtgaagcgaagccgggatcagagatcttgtggactgacggtcttggcgtgatgacccgcggtgtgaccgatgacagcggtaccttgcagttacaacatatatcgccggaacgttcatacattctgggtaaagatgctgaaggcggcgtttttgtctccgagaattttttctacgaaagcgaaatctacaacacccgcttgtatatctttaccgaccgccctctgtatcgtgcaggcgatcgtgttgatgtaaaagtgatgggccgcgagttccacgacccgttgcattcatcccccatcgtcagcgccccggcgaagctttcagtgctggacgccaacggcagtctgttgcaaaccatcaatgtcacgctggatgcgcgtaatggcgggcaggggagtttccgcctgccagaaaatgccgtcgccggaggttatgagttacgcctggcttaccgcaaacaggtctatagcagcagttttcgcgtagccaactacatcaaaccacattttgagattggcttagccctcgacaaaaaagatttcaaaactggcgaagcggtcagcggcaaactgcaactactctatccggatggcgaaccggtaaaagatgccagcgtgcagttaagtttgcgcgctcagcaactttcgatggttggtaacgatttgcgttatgccggacgtttcccggtgtcgctggaaggtagcgacgctgtttctgacgataaaggcaatgtagcgttaaaccttcccgccgccgataaaccgagccgctatttactgaccgtctccgccagcgatggcgcggcatatcgtgttactactaccaaagagatcctcattgaacgcggtctggcgcattactctctaagcacctccgcacaatacagtaatagcggcgagtcggttgttttccgttatgccgcgctggaatcttcaaagcaggtgcctgttaagtatgagtggctacgcctggaagaccgaacaagctacagcggagatctaccgtctggcggtaaatccttcaccgttaatttcgataaaccaggtaactacaatctgacgttacgcgataaagacggcttaattctcgccgggttaagtcatgcggtcagtggtaagggcagcatggcgcatgcgggtacggtagatattgtggcaaataaaacgctgtaccagcctggcgaaaccgcgaagatgctgattaccttcccggagccaattgatgaagcattattgacgctggaacgcgatcgcgttgaacagcagtcgctgctatcgcatccggcaaactggctgacgttacaacgtttaaacgatacccagtatgaagcccgcataccggtgagcaattcctttgcgcctaacatcactttttcggtgctgtatacccgtaacggtcagtacagttttcagaacgccgggatcaaagttgccgtttcccagctggatatccgggtgaaaacggacaaaacccattaccagcctggtgaactggtcaatgtcgaattaacctcgtcgctgaaaggtaaacctgtttctgcgcagctaacggttggtgtggtcgatgaaatgatctacgcgctgcaaccggaaatcgcgccgaatatcggcaaatttttctatccgctggggcgtaacaatgtgcgtaccagctccagtctgtcgtttatcagctacgaccaggcgctctccagcgagccggttgcgccaggcgcgactaaccgcagcgagcggcgagtaaaaatgcttgaacgtccacggcgtgaagaggtggataccgcggcatggatgccgtcactcacaaccgataaacaaggcaaagcgtatttcacgttcctgatgcctgattcgttaacccgctggcgtatcaccgcgcgtgggatgagcggcgacgggttggtcgggcaggggagtgcttatctgcgttcggaaaaaaatctctacatgaagtggagtatgccaacggtgtatcgcatgggcgacaaaccggcggcaggactgtttatcttcagtcagcaggataacgaaccggtggcgctggtgactaaatttgcaggcgctgagatgcgccagacgctgacgctgcacaaaggggcgaattatatttcgctgacgcagaacattcagcaatctggcttgttaagcgcagaactgcaacaaaatgggcaagtgcaggacagcattagcacaaaactgtcttttgtggataacagctggcccgttgaacagcagaaaaatgtcatgctcgccggtggcgataacgcgctgatgttgcccgagcaggctagcaatatccggctacaaagtagcgaaacgccgcaggagattttccgtaacaatcttgatgcgttagtcgatgaaccgtggggtggcgtgattaataccggtagccgtctgatcccgctcagtctcgcctggcgttcgcttgccgatcatcaaagtgccgccgctaacgacattcgtcagatgattcaggataaccgtctgcggctgatgcaactggcggggcccggagcgcgctttacctggtggggtgaagatggcaatggcgacgccttcctcacggcatgggcatggtacgccgactggcaggccagccaggcgctcggcgtaacgcaacaaccggattactggcagcatatgctcgacagttatgccgagcaggcagataacatgccgttattgcatcgggcgctggtgctggcgtgggcgcaggagatgaatctgccgtgcaaaacgttgttgaaagggttggatgaagctatcgcccggcgcggaactaaaactgaagatttctctgaggaagacaccagcgatatcaatgacagcctgatcctcgatacaccggaatctccactggcagatgcggtggcaaacgtcttaaccatgacgttgctgaaaaaagcgcagttgaagtccacggtgatgccacaggttcagcaatatgcgtgggataaagcggcaaacagcaatcagccgctggcgcacacggttgtgctgctcaatagcgggggcgacgctacccaggcggctgctattttaagtggtttgaccgctgagcaatctactattgagcgcgcgctggccatgaactggctggcgaaatatatggcgacaatgcctccagttgttttgcctgcgcctgcgggcgcatgggccaaacataagctaactggagggggcgaatactggcgttgggttggtcagggcgtgccggacattctctcttttggtgacgaattatcgccgcaaaatgtgcaggtccgctggcgtgaaccggcaaaaacggctcaacaaagtaacattccggtgaccgttgaacgccagttgtatcggcttatccccggtgaagaagagctgagctttactctgcagccggtgaccagcaatgagattgacagcgatgcgctgtatctcgatgaaatcacgcttaccagcgagcaggatgcagttctgcgctatggtcaggtggaagtaccgctcccaccgggagccgacgttgagcgcacaacatggggcatttcggtcaataaacccaacgccgcgaaacagcaggggcagttgctggaaaaagcgcgaaatgaaatgggcgaactggcctatatggtgctggtgaaagaacttacgggaacggtcactttccgccatttgctgcgcttctcgcaaaaagggcaattcgttctgcctcctgctcgttatgtgcgttcctatgcacctgcacagcaaagtgttgcggcagggagcgaatggaccgggatgcaggtgaaa

SEQ ID NO: 657 - DNA, 2625 bp, Escherichia coli
atgagcgaccttgcgagagaaattacaccggtcaacattgaggaagagctgaagagctcctatctggattatgcgatgtcggtcattgttggccgtgcgctgccggatgtccgagatggcctgaagccggtacaccgtcgcgtactttacgccatgaacgtactaggcaatgactggaacaaagcctataaaaaatctgcccgtgtcgttggtgacgtaatcggtaaataccatccccatggtgactcggcggtttatgacacgatcgtccgtatggcgcagccattctcgctgcgttacatgctggtagacggtcagggtaacttcggttccatcgacggcgactctgcggcggcaatgcgttatacggaaatccgtctggcgaaaattgcccatgaactgatggccgatctcgaaaaagagacggtcgatttcgttgataactatgacggcacggaaaaaattcccgacgtcatgccaaccaaaattcctaacctgctggtgaacggttcttccggtatcgccgtaggtatggcaaccaacatcccgccgcacaacctgacggaagtcatcaacggttgtctggcgtatatcgatgatgaagacatcagcattgaagggctgatggaacacatcccggggccggacttcccgacggcggcaatcattaacggtcgtcgcggtattgaagaagcttaccgtaccggtcgtggcaaggtatatatccgcgcccgtgccgaagtggaagttgacgcaaaaaccggacgtgaaaccattatcgtccacgaaattccgtatcaggtaaacaaagcgcgcctgatcgagaagattgcggaactggtaaaagaaaaacgcgtggaaggcatcagcgcgctgcgtgacgagtctgacaaagacggtatgcgcatcgtgattgaagtgaaacgcgacgcggtcggtgaagttgtgcttaacaacctctactcccagacccagttgcaggtttctttcggtatcaacatggtggcattgcaccatggtcagccgaagatcatgaacctgaaagacatcatcgcggcgtttgttcgtcaccgccgtgaagtggtgacccgtcgtactattttcgaactgcgtaaagctcgcgatcgtgctcatatccttgaagcattagccgtggcgctggcgaacatcgacccgatcatcgaactgatccgtcatgcgccgacgcctgcagaagcgaaaactgcgctggttgctaatccgtggcagctgggcaacgttgccgccatgctggaacgtgcgggcgacgatgctgcgcgtccggaatggctggagccagagttcggcgtgcgtgatggtctgtactacctgaccgaacagcaagctcaggcgattctggatctgcgtttgcagaaactgaccggccttgagcatgaaaaactgctcgacgaatacaaagagctgctggatcagatcgcagaactgctgcgtattcttggcagtgccgatcgtctgatggaagtgatccgcgaagagctggaactggttcgtgaacagttcggtgacaaacgtcgcactgaaatcaccgccaacagcgccgacatcaacctggaagatctgatcactcaggaagatgtggtcgtgacgctctctcaccagggctacgtgaagtatcagccgctttctgaatacgaagcgcagcgtcgtggcgggaaaggtaaatctgccgcacgtattaaagaagaagactttatcgaccgactgctggtggcgaacacccacgaccatattctgtgcttctccagccgtggtcgcgtctattcgatgaaagtctatcagttgccggaagccactcgtggcgcgcgcggtcgtccgatcgtcaacctgctgccgctggagcaggacgaacgtatcactgccatcctgccggtgaccgagtttgaagagggcgtgaaagtcttcatggcgaccgctaacggtaccgtgaagaaaactgtcctcaccgagttcaaccgtctgcgtaccgccggtaaagtggcgatcaaactggttgaaggcgatgagctgatcggcgttgacctgaccagcggcgaagacgaagtaatgctgttctccgccgaaggtaaagtggtgcgctttaaagagtcttctgtccgtgcgatgggctgcaacaccaccggtgttcgcggtattcgtttaggcgaaggcgataaagtcgtctctctgatcgtgcctcgtggcgatggcgcaatcctcaccgcaacgcagaacggttatggtaaacgtaccgcagtggcggaatacccgactaagtcgcgtgcgacgaaaggggttatctccatcaaggttaccgaacgtaacggtttagtggttggcgcggtgcaggtagatgactgcgaccagatcatgatgatcaccgatgccggtacgctggtacgtactcgcgtttcggaaatcagcatcgtgggccgtaacacccagggcgtgatcctcatccgtactgcggaagatgaaaacgtagtgggtctgcaacgtgttgctgaaccggttgacgaggaagatctggataccatcgacggcagtgccgcggaaggggacgatgaaatcgctccggaagtggacgttgacgacgagccagaagaagaa

SEQ ID NO: 658 - DNA, 1626 bp, Escherichia coli
atgaaaactcgcgactcgcaatcaagtgacgtgattatcattggcggcggcgcaacgggagccgggattgcccgcgactgtgccctgcgcgggctgcgcgtgattttggtagaacgccacgacatcgcaaccggtgccaccgggcgtaaccacggcctgctgcacagcggtgcgcgctatgcggtaaccgattcggaatcggcccgcgaatgtattagtgaaaaccagatcctgaaacgcattgcgcgtcactgcgttgaaccgaccaacggcctgtttatcaccctgccggaagatgatctctccttccaggccacttttatccgcgcctgcgaagaagcagggatcagcgcagaagctatagacccgcagcaagcgcgcattatcgaacctgccgttaacccggcactgattggcgcggtgaaagttccggatggcaccgttgatccatttcgtctgaccgcagcaaacatgctggatgccaaagaacacggtgccgttatccttaccgctcatgaggtcacgggactgattcgtgaaggcgcgacggtgtgcggcgttcgtgtacgtaaccatctcaccggcgaaactcaggcccttcatgcgcctgtcgtggttaatgccgctgggatctgggggcaacacattgccgaatatgccgatctccgcattcgcatgttcccggcgaaaggatcgctgctgatcatggaccaccgcattaatcagcatgtgatcaaccgctgccgcaaaccgtccgacgccgatattctggtgcctggcgataccatttcgctgattggcaccacctctttacgtattgattacaacgagattgacgataatcgagtgacggcagaagaagttgatattctgctgcgtgaaggggaaaaactggcccccgtgatggcgaaaacgcgcattttgcgggcctactctggcgtgcgtccactggttgccagcgatgacgacccgagcggacgtaacgtcagccgtggcatcgtgctgctcgatcatgctgaacgcgatggtctggacggatttatcaccatcaccggtggcaaactgatgacctatcggctgatggcggaatgggctaccgacgcggtatgtcgcaagctgggcaatacgcgcccctgtaccactgccgacacgccgttgcctggctcacaggaaccggcagaagtcacgctgcgcaaagtgatctccctgcccgctccgctgcgcggttccgcagtttaccggcacggcgatcgcacaccagcctggctgagcgaaggccgcctgcaccgcagcctggtatgtgagtgcgaagcggtaactgcgggtgaagtgcagtacgcagtagaaaatttaaatgttaacagcctgctggatttacgccgtcgtacccgtgtagggatgggtacctgccagggcgaactctgcgcctgccgggctgccggactgctgcaacgttttaacgtcacgacgtccgcgcaatctatcgagcaactttccaccttccttaacgaacgctggaaaggcgtgcaacccatcgcctggggagacgcactgcgcgaaagcgaatttacccgctgggtttatcagggactgtgtggtctggagaaggagcagaaagatgcgctt

SEQ ID NO: 659 - DNA, 1206 bp, Escherichia coli
atgttaaaagtggaaatgctatccaccggggatgaagtgttacacgggcaaatcgttgacactaacgctgcctggctggccgattttttctttcatcaggggttgccattatctcgccgcaatacggtgggagataaccttgatgacttagtgaccattcttcgcgaacggagtcagcacgccgatgtgctgatcgttaacggcgggctggggccgaccagtgatgatttaagcgcactcgccgctgcaacagcaaaaggtgaaggcctggtgctgcatgaggcctggctcaaagagatggaacgctatttccacgaacgtggacgagtaatgacaccgagcaaccgtaaacaagcggagctacctgccagtgctgaatttatcaataacccggtaggcaccgcctgtggttttgccgtgcagcttaatcgttgcctgatgttctttacccccggcgtaccgtcagaatttaaggtgatggtcgagcacgaaatcctgccgcgcctgcgcgagcgtttttctttaccgcagccgccggtttgtctgcgtttgactacatttggtcgttcggaaagcgatctggcacaaagcctggacaccctgcaactgccgccgggggtaacaatgggctatcgctcttctatgccgattatcgaactgaaactcaccggaccggcaagcgagaaacaggcgatggaaaaactgtggctggacgttaaacgtgttgccggacagagcgtgattttcgaaggtaccgaaggactgccctcgcagatcagccgcgaattgcaaaaccgccagttcagcctgacgttgagcgagcaattcaccggtggtttattggctttgcaactttctcgcgcaggtgctccattgctggcgtgtgaagtggttccttcacaggaggaaaccctggcgcaaactgcgcactggattacagaacggcgggccaaccattttgccgggctggcactggctgtttctggtttcgagaacgaacatctcaactttgcgctagccacgccagacggcactttcgctctgcgtgtgcgtttcagcactacgcgctacagcctggctatccgtcaggaagtgtgcgcaatgatggcactgaatatgctgcgccgttggttaaacggccaggacatcgccagtgagcatggctggattgaggttgttgagtccatgactttatccagtgcgctg

SEQ ID NO: 660 - DNA, 993 bp, Escherichia coli
atgatacaacctatttccggccctcctcctgggcaaccaccaggtcagggagataacctgccgtctggcgcgggcaatcagcctttatccagtcagcaacgtacttcgctggaaagcttaatgacgaaagtgacctcactgacgcaacaacaaagagcagaactgtgggcgggtatcaggcacgatattggtctgtcgggagattcaccgctgctttcgcgtcacttccctgccgctgagcacaatctggcgcaacgtctgctggccgcgcaaaaaagccattctgcccgccagcttttagcgcaattaggggagtatctacgtctggggaataatcgtcaggcggtcacggattatatccgtcataactttggtcagacgccgctgaatcagctctcaccggagcaattaaaaaccattctaaccctgttgcaggaagggaggatggttattccgcaaccgcagcagcgcgaggcgaccgaccgtccgttattaccggcggagcacaatgcgctcaaacagctggtgaccaaacttgcggcggcaacgggagaacccagcaagcagatctggcaatcgatgctggaactttccggggtgaaagatggtgagttaattccagcgaaactgtttaaccatctggtgacctggctacaggcgcgtcagacgctaagccagcaaaatacgccgacgcttgaatcactccagatggcgctaaaacaacctttagatgccagtgaactggcggcgttatcggcatatatccagcaaaaatatggcctttctgcgcaatcatcgctttcttctgcccaggccgaggatattcttaatcagctttatcaacggcgggttaaagggattgatccgcgtgatatgcaaccgctgcttaatccttttccaccgatgatggacacgttgcaaaatatggcaacgcgtcccgcgctgtggatactgttagtcgcgattatcctgatgctggtctggctggttcgt

SEQ ID NO: 661 - DNA, 1086 bp, Escherichia coli
gtgatggctggaaacacaattggacaactctttcgcgtaaccaccttcggcgaatcgcacgggctggcgctcggctgcatcgtcgatggtgttccgccaggcattccgctgacggaagcggacctgcaacatgaccttgatcgtcgtcgccctgggacatcgcgctacaccacccagcgtcgtgagccggatcaggtcaaaattctctccggtgtttttgaaggcgttactaccggcaccagcattggcttgttgatcgaaaataccgaccagcgttctcaggattacagcgccattaaagacgttttccgtccaggccatgccgattacacctacgaacaaaaatacggtctgcgcgattatcgcggcggcgggcgctcttccgcccgcgaaaccgccatgcgcgtggcggcgggggcgattgccaaaaaatatctcgccgagaaatttggcattgagattcgcggctgcctgactcagatgggcgacattccgctggaaatcaaagactggtcgcaggtcgagcaaaatccgtttttctgcccggacccggacaaaatcgacgcgttagatgaactgatgcgcgcgctgaaaaaagagggcgactccatcggcgcgaaagtcaccgttgttgccagtggcgtccccgccggacttggcgagccggtctttgaccgcctggatgccgacatcgcccatgcgctgatgagcatcaacgcggtgaaaggcgtagaaattggtgatggttttgacgtggtggcgctgcgtggcagccagaaccgcgacgaaatcaccaaagacggtttccagagcaaccatgcgggcggcattcttggcggtatcagcagcgggcagcaaatcattgcccatatggcgctgaagccaacctccagcattaccgtgccagggcgtaccattaaccgctttggcgaagaagttgagatgatcaccaaaggccgtcacgatccttgtgtcgggatccgtgcggtgccgatcgcagaagcgatgctggcgatcgttttaatggatcacctgttacggcagcgggcgcaaaatgccgatgtgaagactgatattccacgctgg

SEQ ID NO: 662 - DNA, 1308 bp, Escherichia coli
atgggtcaggttttaccgctggttacccgccagggcgatcgcatcgccattgttagcgggttacgtacgccttttgcccgccaggcgacggcttttcatggcattcctgctgttgatttggggaagatggtggtaggcgaactgctggcacgcagcgaaattcccgccgaagtgattgaacaactggtttttggtcaggtcgtacaaatgccggaagcccccaacattgcgcgtgaaattgttctcggtactggaatgaatgtgcataccgatgcttacagcgtcagccgcgcttgcgctaccagtttccaggcgattgcaaacgtcgcagaaagcctgatggcgggaactattcgcgcggggattgccggtggggccgattcctcttccgtattgccaattggcgtcagtaaaaaactggcgcgcgtgctggttgatgtcaacaaagctcgaaccatgagccagcgcctgaaactcttctctcgcctgcgtttgcgcgacttaatgccggtgcctccggcagtggcggaatactctactggcttgcggatgggcgacaccgctgaacaaatggcgaaaacctacggtattactcgcgaacagcaagatgcattagcgcaccgttcgcatcagcgagccgctcaggcgtggtcagacggtaaactcaaagaagaggtgatgactgcctttatccctccttataaacaaccgcttgtcgaagacaacaatattcgcggtaattcctcgcttgccgattacgcaaagctgcacccggcgtttgatcgcaaacacggaacggtaacggcggcaaacagtacgccgctgaccgatggcgcggcagcggtgatcctgatgactgaatcccgggcgaaagaattagggctggtaccgctggggtatctgcgcagttacgcatttactgcgatagatgtctggcaggacatgttgctcggtccggcctggtcaacgccgctggcgctggaacgtgccggtttgacaatgagcgatctgacattgatcgatatgcacgaagcctttgcagctcagacactggcgaatattcagttgctgggtagcgaacgttttgctcgtgatgtactggggcgtgcacatgccactggcgaagtggacgatagcaaatttaacgtgcttggcggttcgattgcttacgggcatcccttcgcggcgaccggcgcgcggatgattacccagacattgcatgaacttcggcgtcgcggcggtggatttggattagtgaccgcctgtgctgcgggtgggcttggcgcggcaatggttgtggaggcggaa

SEQ ID NO: 663 - DNA, 699 bp, Escherichia coli
gtgaaaaaactcatcacagcgaatgatattcgtgaagcacacgcgcgcggcgaacaggcaatgtccgtggttctgcgcgccagcattattaccccggaagcccgtgaagtggcagatctactgggttttaccatcaccgaatgtgatgaatcgactgcggtaacgacgtccgttcccgccagcgtgccagccgataaaaccgaaagtcagcgcatccgcgaaaccatcatcgcccagctaccggaaggccagtttaccgaaagcctggtcgcgcagctgatggaaaaagtgatgaaggaaaaactgtcgctggagcagggtgcaatgcagccgagtttcaaatcggtgaccggcaaaggcggcatcaaagttattgatggcagcagcgtcaagtttggtcgtttcgacggcgcagagccgcattgcgtgggcttgactgatcttgtgaccggagacgacggcagcagcatggccgccggttttatgcagtgggagaacgcattcttcccgtggaccctgaactacgacgaaatcgacatggtgctggaaggggagctgcatgttcgccacgaaggcgaaaccatgatcgccaaagcaggcgacgtgatgtttatcccgaaaggctccagcatcgaatttggtacgacatccagcgtgaaattcctgtatgtcgcctggccggctaactggcaatcccta

SEQ ID NO: 664 - DNA, 1977 bp, Escherichia coli
atgaatcgttttattatggccaacagtcagcaatgtctgggttgtcatgcttgtgaaatcgcctgtgtcatggctcacaatgatgagcaacatgtcctgagccaacaccattttcatccccgaattacggttatcaaacatcagcagcaacgtagtgcagtgacctgtcaccattgcgaagatgcgccctgcgcccgtagctgccctaatggcgcaatcagccacgttgatgacagcattcaggtcaatcagcaaaagtgtattggctgtaaatcctgcgtggtggcctgtccatttggtacgatgcaaatcgtcctgacacccgtcgcggcgggcaaagtaaaagccacggcgcataaatgcgacctttgtgcagggcgcgaaaacggtcctgcctgtgtcgagaattgcccggcggacgcgctgcaactggtcactgatgccgcactctccggcatggcgaaatcccgccgcctgcgcaccgcacgtcaggaacatcaaccgtggcatgccagtaccgcggcacaagaaatgccggtaatgagtaaagtcgagcaaatgcaggcaacgcccgcgcgtggcgagccggacaaactggcgattgaagcgcgcaaaaccggttttgatgaaatttatctgccattccgtgccgatcaggcacaacgggaagcctcgcgctgccttaaatgcggcgagcacagcgtttgtgaatggacctgcccgctgcataaccatattccgcagtggattgaactggtgaaagccggaaacatcgacgccgccgtcgagctttctcaccagaccaacaccctgccggaaattaccggacgcgtttgtccgcaagaccgtttgtgtgaaggagcctgtactattcgcgatgagcacggtgcagtaactatcggcaacattgaacgctacatttcagatcaggcgttggcgaaaggttggcgtcctgacttaagccatgtcaccaaagtggacaagcgggtggcgattatcggtgcaggtccggcagggctggcctgtgcggatgttctgacccgcaatggcatggcggtgacggtgtacgatcgccatccagaaattggtggcttgctcactttcggcattccttctttcaaactggataaatccctgctggcacgccgtcgggaaatcttcagcgcgatggggattcacttcgaactcaattgtgaagtgggtaaagatgtctctttggattcgcttttggaacaatacgacgcggtcttcgttggcgtaggcacttaccgttccatgaaagcgggtttacccaatgaagatgcgccgggcgtttatgacgccctgccgttcctcatcgccaacactaaacaggtgatgggactcgaagagctaccggaagagccgtttatcaataccgccggactcaacgtcgtggtactgggcggcggcgacaccgcgatggactgtgtgcgtaccgcgctgcgccacggcgcgagtaacgtcacctgcgcttatcgtcgtgatgaagctaacatgccaggctcgaagaaagaggtgaagaacgcccgcgaagagggggccaacttcgaatttaacgtccagccggtggcgcttgagctgaatgaacaaggtcacgtttgcgggattcgtttcctgcgtacgcgtcttggcgagccggatgcccaggggcgtcggcgtccagtaccggtggaaggcagtgaatttgtcatgccagccgacgcggtgattatggcgtttggcttcaatccgcacgggatgccgtggctggagtcgcacggtgtaacggtagacaaatggggccgcatcatcgcggatgtggaaagccagtaccgttaccagaccacgaatccgaaaatcttcgccggtggtgacgccgtgcgaggtgcggatctggtggttaccgcaatggcagaaggacgtcatgcggcacaggggattattgactggctgggggtaaaatcagtcaaatctcac

SEQ ID NO: 665 - DNA, 4959 bp, Escherichia coli
atgaaaaagttacgcgtagccgcctgcatgctaatgctggcgctggcagggtgcgacaacaacgataacgcgccaacagcggtgaaaaaagatgcgccttctgaagttactaaagcggcctcttcagaaaacgtgagttcagcaaaactttccgcgccggagcgacaaaaactggcccaacagagtgccggtaaggcgctgacattgctggatctctctgaagttcaacttgatggcgcagccacgctggtgctgacgttctccattcctctcgacccggatcaggatttctcacgcgttatccatgtcgtcgataagaaaatcggcaaagtggatggtgcctgggagctgtcagataatcttaaagagttgcgtttacgccacctcgaaccgaaacgtgatttgatcgttactattggcaaggaagtcaaagcactcaacaacgcaaccttcagtaaagattatgaaaaaactataactacccgcgacatccaacccagcgtcggttttgccagccgtggttcgctgctgcctggcaaagtcgttgaagggctgccggtaatggcgctcaacgttaataatgtcgatgttaacttcttccgcgttaagccagaatctctgccagcattcattagccaatgggaataccgcaattcgctggcgaactggcagtcagacaaactgctgcagatggcggatctggtctacaccggacggtttgatctcaatcctgcgcgtaacacccgtgaaaaattattgctgccgctgggcgatatcaaaccgcttcagcaggcgggcgtgtatctggctgtgatgaatcaggctggacgttacgattacagtaatcccgcgacgctgtttacgttaagtgatatcggcgtttcagctcaccgttatcacaatcgtctggatatctttacccaaagtctggaaaacggcgcggcccagcaaggaattgaagtctctttattaaatgagaaagggcagactctgactcaggcaaccagtgacgctcaggggcatgtgcagctggaaaatgataaaaacgcggcattactgttggcgcgtaaagacggtcagacaacgctactcgatttaaaacttccggcgctggacttagcagaatttaacattgctggcgcgccaggctatagcaaacagtttttcatgtttggcccacgcgatctttatcgcccaggtgaaacggtaatcctcaatggtttgctgcgtgatgcagacggtaaagcgttgcccaatcaacccatcaagttagacgtgattaaacccgatgggcaggtactcaggagcgtcgttagtcagccggagaatggcctctaccactttacctggccactcgatagcaatgcggcaaccggtatgtggcatattcgcgctaacacgggcgataaccagtatcggatgtgggatttccacgtcgaagattttatgccagagcgcatggcgctgaatctgaccggtgagaaaaccccgctaacgccgaaagatgaagtgaaattctccgtggtgggatactacctgtacggtgcgcctgctaatggtaatactttgcaagggcaacttttcctgcgcccactgcgtgaagctgtgtcagccttacctggttttgaattcggcgatatagctgccgaaaatctttcccgcacgctggatgaagttcagttgacgctggatgataaagggcgcggcgaagtttctacagaaagccagtggaaggaaacgcattccccattacaggttattttccagggtagtttgctggaatcgggcggtcgcccggtgacgcgccgcgctgagcaggctatctggcctgccgatgcattgccggggatccgtccgcagttcgcctcgaaatcggtttacgattatcgtactgacagcacggtgaaacagcccattgttgatgaaggcagtaacgccgcttttgacatcgtttatagcgatgcgcaaggcgtgaaaaaagccgtgtcgggcttgcaggtgcgcctgattcgcgaacgccgcgattactactggaactggtcagaagatgaaggctggcagtcacagtttgatcaaaaagatctgatcgaaaatgaacaaactctggatctgaaagcggacgaaaccggcaaggtcagttttccggtagagtggggcgcttatcgtctggaagtcaaagcgccgaatgaagcggtcagtagtgttcgtttctgggctggctatagctggcaggacaacagcgacggtagcggcgcagtgcgacccgaccgtgtcacgctgaaactggataaagccagttatcgccctggcgacaccattaagttgcatatcgccgcgccaacggcgggtaaaggttatgcgatggtcgagtccagtgaagggccgctgtggtggcaagagattgatgttcgggctcaagggctggatctgacgattccggtcgataaaacctggaatcgtcatgatctgtatttaagtacgctggtggtacgtcctggcgataaatctcgctccgcgacgccaaaacgcgcggttggtgtgttgcatctgccgcttggcgatgaaaaccgtcgcctcgatctggcgctggaaacaccagcaaaaatgcgtcccaatcaaccattaaccgtgaaaattaaagccagcactaaaaatggcgagaagcctaaacaggtgaatgtgctggtgtctgccgttgatagtggtgtgctgaatattactgactacgtcacgccagatccgtggcaggcgttctttggtcagaaacgctatggcgcagacatttacgatatttacggtcaggttattgaaggtcaggggcgtctggcagctctgcgtttcggtggcgatggtgatgagctgaaacgtggtggtaaaccgccggtcaatcacgtcaatattgtcgcgcagcaggcgctgccggtaacgctcaacgaacagggtgaaggctcggttacactgccgattggcgattttaacggtgaattgcgcgtcatggcgcaagcctggacggcagatgacttcggtagcaacgaaaggaaagtgatagttgccgcaccggtgattgctgaactgaacatgccgcgttttatggcgagtggcgatacctcgcgcctgacgctggatatcactaatcttaccgataaaccgcaaaaactaaacgttgccctgaccgccagtggtttgcttgaactggtcagcgattcacccgcagccgttgaattagcgccaggcgtacgtactacgctgtttatcccggtgcgagcattgcaaggttatggcgatggagaaattcaggcctccattagtgggttagcgttaccaggtgaaaccgttgccgaccagcataagcagtggaaaatcggcgtccgtccagcgttcccggcacaaacggttaattacggtacggcgttgcagcctggtgaaacctgggcgctcccggcggatggattgcaaaacttctcgcctgttacgctgcaaggtcagctattgttgagcggcaaaccaccgctgaacatcgcacgttatatcaaagagttaaaagcgtatccgtacggctgtctcgagcaaaccgccagcggcctgttcccgtcactttataccaacgcagcccaactgcagtcgttgggcatcaaaggcgacagtgatgagaaacgccgtgcatcggtcgatatcggtatttcccgtttgctgcaaatgcaacgtgataacggcggctttgcgctgtgggataaaaacggtgacgaagagtactggctgacggcttacgtgatggatttcctggtccgcgcaggcgaacagggttacagcgtgccgacagacgccattaaccggggtaatgagcgtctgctgcgctatttacaagatccgggcatgatgtcgatcccgtacgcggataatctcaaagccagtaaattcgccgtacagtcttacgctgcgctggtgttggcccgtcagcaaaaggcaccgctgggtgcgctgcgtgaaatctgggagcatcgtgcagatgccgcttctggtttaccgctgctgcaacttggcgttgcgctgaaaaccatgggtgatgcgacgcgtggtgaagaagcaattgcgttggcgctgaaaacgccgcgtaatagtgatgagcggatatggctgggtgattacggtagtccactgcgcgacaacgcgttgatgctctccttgctggaagaaaataaactgctacccgatgagcagaacactttgctgaacacgctttcgcagcaggcatttggtgaacgctggctatcgacccaggaaagtaacgcgttgttcctggctgcccgtacggttcaggatttacccggtaaatggcaggcgcaaacctctttctcagctgagccgctgacaggcgagaaagcgcaaaacagtaatctgaatagcgatcaacttgctaccttacaggtgaccaacagtggcgatcagccgttatggctgcgtgtggatgccagcggttatcctcaatccgcacctttaccggcgaacaatgtgctgcaaatcgagcgtcatattcttggtactgatggtaagagcaaatcgctggactcgttacgtagcggcgatctggtgctggtctggttgcaggtaaaagccagtaacagcgtgccggatgcgttagtcgtggatctgctgcctgcgggtctggaactggaaaaccagaatctggcgaacggtagcgccagcctggagcaaagtggtggcgaagtgcagaacttactgaaccagatgcagcaggcgagtattaagcacattgagttccgtgacgatcgctttgtggcggcggttgccgttgatgaataccaaccggtaacgctggtgtatctggcgcgggcggtgacgccgggaacgtatcaggtgccgcagcctatggtggaatcgatgtatgttccccaatggcgggcgaccggcgcggctgaagatttgctgattgtcagaccg

SEQ ID NO: 666 - DNA, 981 bp, Escherichia coli
atgcctaaaaaaatgacaacaacccgtaatctattattaatggctacgctattaggtagcgcactatttgccagagctgcggataaagaaatgaccattggcgcaatataccttgatactcagggatattacgctggcgtgcgtcagggcgttcaggatgcggcaaaagattcttcagtacaggtacagttaattgaaactaacgcacagggtgatatttcgaaagaaagtacctttgttgataccctcgtggcgcgtaatgtcgatgccattattttatcggcagtgtctgaaaatggcagtagccgtaccgttcgtcgcgccagtgaagcgggtattccggtgatttgctacaacacctgtattaatcaaaaaggcgtcgataaatatgtctcggcgtatctggtcggcgatccgctggaatttggtaaaaaactgggtaacgctgccgccgattattttattgccaataaaattgaccagccgaaaattgccgtcatcaattgcgaagcctttgaagtttgtgtgcagcgacgtaaaggatttgaagaagtattaaaatcccgcgttcccggcgcgcaaattgtcgctaatcaggaagggactgttttagataaagcgatttccgttggtgaaaaactaattatctccacgccggatctcaacgccattatgggagaatcgggtggtgcgacactcggcgcggtaaaagcggtacgtaatcaaaatcaggccggaaaaattgctgttttcggttcggatatgaccactgaaattgctcaggagctggaaaacaatcaggtgttgaaagcggtggtggatatttccggtaagaaaatgggcaatgctgtcttcgcgcaaacattgaaggttatcaacaaacaagccgacggtgaaaaagtgattcaggtgcctatcgatctctataccaaaacggaagacggtaaacagtggctggcaacgcacgttgatggtctgccc

SEQ ID NO: 667 - DNA, 2520 bp, Escherichia coli
atggctgaaaaatcgcagtacgattttgtcggcgcgtggtgtcacgatgaagatggcggtttgctgcacgttgccaaccaccatattgcgccaggtaaaaaacagtggagttggggacacagtgagtttggccaggcgtgggataagagtctgaccgacaataacggcccgtatatcgaactgatgaccggtatttttgccgataaccagcctgattttacctggcttgatgcgtacgaagagaagcgtttcgagcagtatttcctgccttatcattctctgggcatggtgcaaaatgcctcccgcgatgcggtgataaaactccagcgtagtgagcgggggattgagtgggggctgtatgccatctctccgttgaacggataccgcctggcgatccgcgaaatcggcaaatgcaacgcgttacttgatgatgccgtggcactgatgccagcgaccgccatccagggcgtgttgcacggtatcaatcctgacagactgaccattgagctctccgatgccgacggcaatatcatactgagttatcaggaacatcagccgcaagagttgccgttgccggacgtcgccaaagcgccactggcagcacaagacattaccagtacagatgaagcctggtttatcggtcagcatctggagcaatatcatcacgccagccgttcaccgttcgattactacctgcgcggcgtggcgctggatccgctggattatcgctgtaacctggcgctggcgatgctggaatataaccgcgcagatttcccgcaagcggtggcgtatgccactcaggcgctgaaacgcgcacatgcgctgaacaaaaatccgcagtgcggacaggcgagtttgattcgcgccagtgcttacgaacgtcaggggcaatatcaacaagccgaagaggatttctggcgtgcggtctggagcggcaacagtaaagcaggtggctattatggtctggcacggctggcggcgcgtaatggtaacttcgacgctggtctggatttttgccaacaaagtcttcgcgcctgcccaaccaatcaggaagtgctttgcctgcataatctgctgctggtgttaagtggtcgtcagggcaacgcgcgtttgcagcgtgagaaactgctgcgtgattatccgctgaacgccactctgtggtggctgaactggttcgatggtcgtagcgaatcagccttcgcgcagtggcgcggtctgtgtcagggacgcgacgttaacgccctggtgaccgccgggcaactgattaactggggaatgcccaccctggcggcagagatgctgaacgcactggactgccagcgcacgctgccgctttacctgcaagccagcttgctgccgaaagctgaacgcggcgaactggtcgcaaaagccattgatgtcttcccacagtttgtccgtttcccgaatacgctggaagaagtggcggcgctggagagtattgaagagtgctggtttgcccgtcatttactggcctgcttctactacaacaagcgcagctacaacaaagccattactttatggcaacgttgcgtagagatgtcgccagagtttgccgatggctggcgcgggttggcgatccatgcgtggaataagcaacacgattatgagctggccgcgcgttatcttgataatgcttatcagcttgcgccgcaggatgcacgtctgcttttcgaacgggatttgctggataagttaagtggaaccacaccggagaaacgactggcgcgtctggaaaataatctggaaattgcgctgaaacgcgacgacatgaccgcagaactgctcaatttgtggcatctcacgggtcaggcagacaaagcggcggacattctcgccacgcgcaaattccacccgtgggaaggcggggaagggaagatcaccagtcagtttatcctcaaccagttattacgcgcctggcagcatcttgatgccagagagccgcagcaggccagcgaactgcttcatgccgcgctgcattatccggagaatttaagcgaaggccgtttaccggggcaaactgataacgacatctggttctggcaggcgatatgcgccaacgcgcagggcgatcaaactgaagcgatgcgttgtttacgtctggcggcgactggcgatcgcaccattaacattcacagttattacaacgatcagccggttgattatctcttctggcaaggaatggcgctgcgactgctgggtgaacagcaaaccgcacagcaactgtttagtgaaatgaaacagtgggcgcaagagatggcgaaaaccagtattgaggcggatttctttgctgtttcacaacctgacctgttgtcgctgtatggcgatttacaacagcagcataaagaaaaatgcctgatggtggcgatgctggcgtccgcgggactcggggaggctgcgcactatgaatctgctcgcgctgaattgacggcgattaatccggcctggccgaaagcggcattattcaccactgtgatgccttttatttttaaccgcgttcac

SEQ ID NO: 668 - DNA, 4701 bp, Escherichia coli
gtgaacacaatacacttgcgctgtctcttcaggatgaatcccctggtctggtgcctgtgggctgatgttgcagcaaagctaaggtcgcttaaacgctactcagtattcacttttcagaggatgaaatttatgaacaggaccagtccctattattttcgccgctcagtactttccttattgatatctgccttaatatatgcccagcccgggatggcggccttcactactaatgttattggtgtggtaaacgatgagactgtagatggcaaccaacgagtagatgaacgaggtacaacaaataacacacatattatcaaccatggccggcaggaggtctatggtgggatatctaatagtagtattattgaaactggtggcgagcaactagtatcaatccatgccgatattaacgggcaagctaataatacaaccattaatggaggcagacagtcaattgagtacggaggaatttctactggcacgataatcgaaagtggtaatcaatatgtttataaaggtggtaccagcaatgacacgacaattaagggcggtacttcacgcatagagggggggactgcaaatggaacaatcattgatggtggaggccagtcagtatcaactcaggggcatgttgatggtacaacgataaataagtccggttatcaggacatcacgcaaggaagtctggcgacgaacacaaccataaatggtggtcgacagtatgttgaacagagcacagtagaaacaaccaccattaaaaatggcggtgagcaaagagtatatgagagccgtgcgctggacacgacgattgaaggcggaactcagtctctgaatagtaagtcaacggcaaaaaatactcagatctattctggtggtacgcaaattgttgattacaccagcacctcggatgttattgaagtttattccggtggcgtgcttgatgttagtggtggtacggcaacaaatgttacccagcacgatggtgcaattttaaaaacaaacactaacggtacgacggtgagcggtacgaatagtgaaggggcattctccatccacaataccgtggcagagaatgtgttgctggaaaacggtggtcatttagacataaacgcatatggttcggcaaataagacgattattaaagataaaggaacaatgtcagttttaacgaatgctaaagctgatgcgacccgaatagataatggcggcgttatggatgttgccggaaaagcgacaaataccataattaatggtggcacacagaatattaataattatggtattgccacgggcaccaatatcaacagcggaacacaaaatatcaagagcggcgggaaagctgacacgacaaatatatcctctgggagccggcaggttgttgagaaagatggtacggcaactggcagcaatattagcgccggaggctcgctgattgtctataccggcggtattgcacatggggttaaccaggagacgggcagtgctttagttgccaacacgggcgcagggactgatatcgaaggatacaacaagctctctcacttcactattaccggaggagaggctaattatgttgtgctggaaaataccggcgaactgacggtaatggctaaaacctcggcgaaaaatactaccgttgatgctggcggtaagctgattgtccagaaggaggctaaaacagataccatcagacttaataatggtggcgttctggaggttcaggacggtggtgaggctaagcatgttgagcaacaatccggcggcgcattaattgcttccacgacttccggaacacttatcgaaggaaccaacagttatggtgatgttttctacatcaggaattcagaagctaaaaatgtagtgctggaaaacgctggctcattaacagtcgtcactggttcccgggcagttgacacgattattaatgccaacggcaaaatggatgtttatggaaaagatgttggtactgtacttaatagtgctggtacccaaacaatatatgccagtgccacttctgaaaaagcaaatatcaaaggtggcaagcaaacggtatatggtttagccactgatgcaaatattgaaagtggtgaacaaattgttgatggtgggtcaacagacaaaacgcacatcaatggcggtacgcaaaccgttcagaattatggtaaggcgatcaataccgatatcgtctctggcctacaacaaattatggtaaacgggacagcggaaggttccattattaatggcggttcacaggtagttaatgagggcggtctggctgaaaactcggtgcttaatgaaggcggcactctcgatgtgcgggagaaaggcagcgcaacggggatacagcaaagtagccagggcgcgttggttgcaaccaccagagcgacgcgggtcacagggacacgcgctgatggcgtcgcgttcagcattgagcaggatgcggcgaacaatatcctgctggcaaatggcggcgtgttaaccgtggagtcagacaccacttccgccaaaacacaggtcaatgcgggcgggcgggagatcgtcaaaacaaaagccactgcgacaggcacgacgctcaccggcggcgaacaaatcgtcgagggggtggcgaatgagacaacgattaacgacggcggaatacaaacagtttcggctaacggtgaggcagtaaaaacaacgattaatgaaggcggtacgctgacagtcaacgataatggcaaagcgacagatatcatccagaacagcggtgccgctctccagacgagcacggctaacggtattgaaatcagcggtactcaccagtacggcaccttttccattgccggaaatttagcgaccaatgtgctgctggaaaatggcggtaatttattggtattagcaggtaccgaagctcgcgattccacggttggcaacggtggggcaatgcaaaacctgggtcaggacttcgccacaaaggttaattccggtgggcaatataccctcggtcggtcaaaagatgagtttcaggctctggcccgggcagaagatctactgatcgctggcgggacggcaatcgtctacgcaggtacgctggcggatgcatcggtcagtggcgcgacaggaagcctgtcgttaatgacgccacgggataatgttacgccagttaaacttgaaggggtggtccggattaccgatagcgcgacattaactatcggaaatggcgtcgatacgacgcttgccgacctgacggctgccagccggggcagtgtctggcttaacagcaataattcctgtgcaggcaccagcaactgcgaatatagagtaaacagtttgcttctcaacgacggtgatgtttatttatcagcacaaacagcagcgcctgccacaactaacggtatctacaatacgctgaccaccagtgaactttccggcagcggtaatttctacctgcataccaacgttgcaggctcccggggcgatcaactggtcgtcaacaacaacgccactggtaattttaaaatctttgttcaggataccggcgtcagccctcagtctgacgacgcgatgacgctggtgaaaacagggggaggggatgcttcgtttacgctgggtaataccggcggtttcgttgatcttgggacctatgagtatgtcctgaaaagcgacggcaacagcaactggaacctgaccaatgatgtcaaacccaacccggaccccaacccaaatccgaaaccggatccaaaaccagacccaaaaccggatccgaaaccagacccgactcccgatccaacgccgacacccgtcccggagaaacgcatcacgccttctacggcagccgtactcaatatggcagcaacattaccgttggtatttgatgctgagctaaacagtattcgcgagcggttgaacataatgaaagcgagtccacacaacaataatgtctggggggcgacgtataacacccgtaataatgtcaccaccgatgcgggtgccgggtttgagcagacgctgaccggaatgaccgtggggatcgacagccgtaatgatattcctgaaggaattgccacgctgggcgcttttatgggttattcccattcacatatcggttttgatcgcggaggacatggcagtgtgggcagttattctctgggcggctatgccagttgggaacatgaaagtggtttctatctggacggtatcgtgaagctgaaccgttttgaaagtaacgtagccggtaaaatgagcagcggtggagccgccaacggcagttatcgcagcaacgggctgggcggtcacattgaaaccgggatgcgatttaccgatggtaactggaacctgacgccgtatgcatcgttaacggggttcaccgctgataaccccgaatatcatttatccaatggcatggaatcgaaatcagtcgatacccgcagtatatatcgtgaactgggcgcaacgctgagttacaacatgcgtctggggaacggtatggaagttgagccgtggctgaaggcggctgtgcgcaaagaatttgtcgatgataaccgggtgaaagtgaataatgacggtaattttgtcaatgatttgtcgggcagacgtggaatataccaggcaggtattaaagcctcattcagcagttcattaagcgggcatctcggggtggggtatagccatggtgccggtgtggaatccccgtggaacgcggtagctggtgtgaactggtcgttc

SEQ ID NO: 669 - DNA, 624 bp, Escherichia coli
atggtaagcagacgcgtacaagcacttctggatcaattacgtgcgcaaggtattcaggatgagcaggtgctgaatgcacttgccgccgtgccgcgtgaaaaattcgttgatgaagcgtttgaacaaaaagcctgggacaatatcgccttgccgataggtcaggggcagacaatttcgcagccgtatatggtggcgcgaatgaccgaattactcgagctgacgccgcagtcgcgggtgctggaaattggcaccggttcgggatatcaaacggcaatcctggcgcatcttgtccagcatgtttgctcggtcgaacggattaaaggtttgcagtggcaggcgcgtcgccgcctgaaaaatcttgatttacataatgtttcaacccgtcatggcgatggatggcaaggttggcaggcacgtgcgccgtttgacgctatcattgttacggcggcaccgccggaaattccaactgcactaatgacgcagctggacgaaggcgggattctcgtcttacccgtaggggaggagcaccagtatttgaaacgggtgcgtcgtcggggaggcgaatttattatcgataccgtggaggccgtgcgctttgtccctttagtgaagggtgagctggct

SEQ ID NO: 670 - DNA, 1650 bp, Escherichia coli
gtggttatctacgcttttaacaaacgattgatggaatattttatgaaagggaaatctgcattaacgcttctgcttgctggtatattttcgtgctgcacatgccaggcgataggggcagaagtgacgagtgactccgtatttaacattcttaattccaggggggaagcaatagataaaagttatttatcgttaaatccagataagtatcctaattatcgtcttctgattcactcagccaaattacaaaatgaaataaagagccactataccaaagacgaaattcaaggattgttaacattaacagaaaacacacgaaagttagcgttgacggagaaaccctggggaacgtttattcttgcttctactttcgaagatgacaaaacagcggcagaaacccactatgatgctgtctggctgagggatagtttatggggctatatggcattagtatcagatcaggaaaatagggtagctgcaaaaaagattctgctcaccctgtgggattatatatctacgcccgaccagattaagcggatgcaggatgtcattagcaacccaaaacgactggatggaattcccgggcaaatgaatgctgtgcatatccgatttgacagcaactcccccgtgatggcagatgtgcaggaagaaggcaagccgcagctgtggaaccataaacaaaatgatgctttaggtctttatcttgatctccttatacaagcaatcgacactggtactattaacgctgaagactgggaaaaaggtgaccgattaaaatcgattgcgctgttggttgcttatctggataaatccaatttctatattatggaagattctggagcgtgggaagaagatgcccgattaaacacatcttccgttgcactggtgacctcgggactggaacgtttgtcgaacttactctcgaagaaagactctgtttttatttctgatttactacgcgaagctaaagccaatgaactggatgaaactttttcaacaacgaggttgaaccatctcatagataaagggtatgaaagaataacgctacagcttgatttagggggagaatcccctggttatctggaaaaagataaacattacagagaagctgatgcggccttacttaatgttatttatcctgcaaatctttcaaagataaacaccagaagaaaagagcaagttctaaaaatagttaaaaaactagcaggtccgtatggtataaaaagatacgagaaggataattatcagtcggcaaatttttggttcaatgatattaaaactgatactgatgaaaattcacatgcgaaaagagaaatgagcttcattccatcaacagaagcagaatggttttttgactcatggtatgcaaaatcagcagcaattgtttataaagaatcaagaaaagaagagtatttgaatgactcagtgcaatttatgaatagatcattggcccaaataacaggcgagaatatgattggtgcaaatggcaggagtgtaccagaaatggcacttcccgaaagctataactatatccacaagtcgggaactttgcatgaagcgccaagccctatcattccgctaaattggtcgaaagcttcaatgactctcatgttgaaagagatgtccaaccttatcaatgatgagggaattaaa

SEQ ID NO: 671 - DNA, 1209 bp, Escherichia coli
atggctaagaatattccattcaaactgattcttgaaaaagcaaaagattaccaggcagacatgactcgctttctgcgcgatatggttgctattcccagtgaaagctgcgatgaaaaacgcgtagtacatcgtattaaagaagagatggaaaaagtcggcttcgataaagttgaaatcgacccgatgggcaacgttctcggttatatcggccacggcccgcgtctggtggcaatggacgctcatattgataccgtcggcattggcaacatcaaaaactgggacttcgatccgtacgaaggcatggaaactgatgaactgatcggtggtcgcggtacttccgaccaggaaggcggcatggcctctatggtttatgccggtaaaatcattaaagacctcggtctggaagatgaatataccctgctggttaccggtacggtgcaggaagaagactgcgacggtctgtgctggcagtacattattgaacaatccggcattcgcccggaatttgtggtcagtactgaaccgactgattgccaggtataccgtggtcaacgcggtcgtatggaaattcgtattgatgttcagggtgttagctgccacggttctgcaccagaacgcggtgacaacgccattttcaaaatgggtccgattcttggcgaattacaagaactctcccagcgcctgggctatgatgaattcctcggcaaaggcaccctcaccgtttctgaaatcttcttcacatccccaagccgttgcgctgtagcagatagctgcgcagtttcaatcgaccgtcgtctgacctggggcgaaacctgggaaggcgcgctggacgaaatccgcgccctgcctgcggtacagaaagctaacgcggttgtttctatgtacaactacgaccgtccgtcctggactggcctggtttacccaaccgaatgctacttcccgacctggaaagtggaagaagatcacttcactgttaaagcactggtgaatgcctacgaaggtctgtttggcaaagcgccggttgttgataagtggaccttctcaactaacggcgtatctatcatgggccgtcacggcattccggtgatcggctttggcccgggtaaagaacctgaagcgcatgcacctaacgaaaaaacctggaaatctcacctggtgacctgtgccgcgatgtacgctgcaatcccgttaagctggctggcaaccgaa

SEQ ID NO: 672 - DNA, 882 bp, Escherichia coli
atgctcgcatgttgcgcaatctactcgcccgtccgctgcgcttttccttatactgagactgagcgtcgattcacctgcaaacggcgcatttttagaataatcctgaccttgtgcggaagagaaaacatgaaaattcgcgccttattggtagcaatgagcgtggcaacggtactgactggttgccagaatatggactccaacggactgctctcatcaggagcggaagcttttcaggcttacagtttgagtgatgcgcaggtgaaaaccctgagcgatcaggcatgtcaggagatggacagcaaggcgacgattgcgccagccaatagcgaatacgctaaacgtctgacaactattgccaatgcgctaggcaacaatatcaacggtcagccggtaaattacaaagtgtatatggcgaaggatgtgaacgcctttgcaatggctaacggctgtatccgcgtctatagcgggctgatggatatgatgacggataacgaagtcgaagcggtgatcggtcacgaaatggggcacgtggcgttaggccatgtgaaaaaaggaatgcaggtggcacttggtacaaatgccgtgcgagtagctgcggcctctgcgggcgggattgtcggaagtttatctcaatcacaacttggtaatctgggcgagaaattagtcaattcgcaattctcccagcgccaggaagcagaagccgatgattattcttacgatcttctgcgccaacgcggcatcagcccggcaggtcttgccaccagctttgaaaaactggcaaaactggaagaaggtcgccaaagctcaatgtttgacgaccatcctgcatccgccgaacgcgcccagcatattcgcgatcgcatgagcgcggatgggattaag

SEQ ID NO: 673 - DNA, 708 bp, Escherichia coli
gtgatgtaccgttatttgtctattgctgcggtggtactgagcgcagcattttccggcccggcgttggccgaaggtatcaatagtttttctcaggcgaaagccgcggcggtaaaagtccacgctgacgcgcccggtacgttttattgcggatgtaaaattaactggcagggcaaaaaaggcgttgttgatctgcaatcgtgcggctatcaggtgcgcaaaaatgaaaaccgcgccagccgcgtagagtgggaacatgtcgttcccgcctggcagttcggtcaccagcgccagtgctggcaggacggtggacgtaaaaactgcgctaaagatccggtctatcgcaagatggaaagcgatatgcataacctgcagccgtcagtcggtgaggtgaatggcgatcgcggcaactttatgtacagccagtggaatggcggtgaaggccagtacggtcaatgcgccatgaaggtcgatttcaaagaaaaagctgccgaaccaccagcgcgtgcacgcggtgccattgcgcgcacctacttctatatgcgcgaccaatacaacctgacactctctcgccagcaaacgcagctgttcaacgcatggaacaagatgtatccggttaccgactgggagtgcgagcgcgatgaacgcatcgcgaaggtgcagggcaatcataacccgtatgtgcaacgcgcttgccaggcgcgaaagagc

SEQ ID NO: 674 - DNA, 633 bp, Escherichia coli
gtgacagcgcccttctttccacgcatactgggcgctgttgcttttttgaaccaggaaacagaacctctgacaatgaatttactgcatcactttcttattgccatgcctgctctccaggatccgattttccgtcgttccgtggtctacatttgcgaacataataccaatggtgcaatggggatcatcgtcaacaagccgctggaaaatctcaaaattgaagggattctggaaaagctgaagatcacgccggagccgcgtgatgaatcaatccgtctggataaaccggttatgctcggcggtccgctggctgaagatcgcgggtttattttgcatactccgccctccaattttgcttccagcattcgcatttcagacaacacggtaatgaccacttcccgcgatgtgctggaaacgctcggcaccgataaacaaccgtctgacgtattggtggctctgggttatgcctcctgggagaaaggtcaactggaacaagaaattctcgataacgcgtggctaacggccccggcagatctgaatattctgttcaaaacgccgattgccgaccgctggcgcgaggcggcaaaactgattggtgtggatattctcaccatgcctggtgtggcaggacacgcc

SEQ ID NO: 675 - DNA, 1023 bp, Escherichia coli
gtgccaggttatgcgcaatatcgttcattttccgaggatcttagtatgaatatggaagaaattgtggcccttagtgtaaagcataacgtctcggatctacacctgtgcagcgcctggcccgcacgatggcgcattcgcggcagaatggaagctgcgccgtttgatacgccggacgtcgaagagctactgcgggagtggctggatgacgatcagcgggcaatattgctggagaatggtcagctggattttgccgtgtcgctggcggaaaaccagcgattgcgtggcagcgcattcgcgcaacggcatggcatttcgctggcgttacggctgttaccttcgcactgcccgcagctcgaacagcttggcgcaccaacggtattgccggaattactcaagagcgagaatggcctgattctggtgacgggggcgacggggagtggcaaatctaccacgctggcggcgatggttggctatctcaatcaacatgccgatgcgcatattctgacgctggaagatcctgttgaatatctctatgccagccagcgatgtttgatccagcagcgggaaattggtttgcactgtatgacgttcgcatcgggattgcgggccgcattgcgggaagatcctgatgtgattttgctcggagagctgcgtgacagcgagacaatccgtctggcactgacggcggcagaaaccgggcatttggtgctggcaacattacatacgcgtggtgccgcgcaggcagttgagcgactggtggattcatttccggcgcaggaaaaagaccccgtgcgtaatcaactggcaggtagtttacgggcagtgctgtcacaaaagctggaagtggataaacaggaaggacgcgtggcgctatttgaattgctgattaacacacccgcggtggggaatttgattcgcgaagggaaaacccaccagttaccgcatgttattcaaaccgggcagcaggtggggatgataacgtttcagcagagttatcagcaccgggtgggggaagggcgtttg

SEQ ID NO: 676 - DNA, 1260 bp, Escherichia coli
atggcactgactgacgcaaaaatccgggcagcaaagcctactgacaaggcttataaactcactgacggggctggcatgttcctgctggtacatcctaatggttcccgttactggcgtctccgttatcgtattctgggtaaggagaagactctggcacttggtgtgtatccagaagtttctctctccgaagctcgtacaaaacgggatgaggcccgaaaactgatttcagaggggattgacccttgcgaacagaaaagagttaaaaaagtagtccctgatttacagctctcttttgaacatattgcacgacgctggcatgccagtaataaacaatgggcacaatcacacagcgataaagtactcaaaagcctcgagacacacgttttcccctttatcggcaaccgggatatcacaacactcaataccccggacctgcttatccctgttcgtgctgcagaagcaaaacaaatttatgaaatcgccagtcgtctgcagcaaagaatatctgctgtaatgcgttacgccgtacagtctggcatcatcagatataacccggctctggatatggctggtgcattgaccacggtaaaacgccagcatcgccccgctctgaatctttcacgcctgcctgaacttctgtcgcgtattgacggttataaaggccagcctgtcacccggcttgccgttatgctgaatttactggtttttattcgttccagtgaactcagatatgcccgctggtctgaaattgatattgacaatgccatgtggactattccagccgaacgcgaacctctgcctggcgtaaaattctcacaccggggctccaagatgcggacaccacatcttgtgccactcagtaaacaggctgtagccatactgacagaacttcagacatgggcaggtgaaaatggtctgatatttacgggtgcacatgacccgcgtaaaccaatcagtgaaaatactgtaaataaagccctgagggtgatggggtatgacacaacccaggaagtctgtggccatggattccgggcgatggcgtgcagtgcattgattgaatcaggtttgtggtcccgcgatgctgtggaacgtcagatgagccatcaggaacgtaacggtgtacgtgctgcttacattcataaagcagaacatctggaagaacggcgactgatgctacagtggtgggccgattttctggatgcaaacagagaaaaatttatcagtccatttgaatatgcaaagattaataacccattaaaa

SEQ ID NO: 677 - DNA, 1485 bp, Escherichia coli
atgcaaatgaagaaattgctccccattcttatcggcctgagcctttctgggttcagttcgttgagccaggccgagaacctgatgcaagtttatcagcaagcacgccttagtaacccggaattgcgtaagtctgccgccgatcgtgatgctgcctttgaaaaaattaatgaagcgcgcagtccattactgccacagctaggtttaggtgcagattacacctatagcaacggctaccgcgacgcgaacggcatcaactctaacgcgaccagtgcgtccctgcagttaactcaatccatttttgatatgtcgaaatggcgtgcgttaacgctgcaggaaaaagcagctgggattcaggacgtcacgtatcagaccgatcaacaaaccttgatcctcaacaccgcgaccgcttatttcaacgtgttgaatgctattgacgttctttcctatacacaggcgcaaaaagaagcgatctaccgtcaattagatcaaaccacccaacgttttaacgtgggcctggtagcgatcaccgacgtgcagaacgcccgcgcacagtacgataccgtgctggcgaacgaagtgaccgcacgtaataaccttgataacgcggtagagcagctgcgccagatcaccggtaactactatccggaactggcggcgctgaatgtcgaaaactttaaaaccgacaaaccacagccggttaacacgctgctgaaagaagccgaaaaacgcaacctgtcgttgttacaggcgcgcttgagccaggacctggcgcgcgagcaaattcgccaggcgcaggatggtcacttaccgactctggatttaacggcttctaccgggatttctgacacctcatatagcggttcgaaaacccgaggtgccgctggtacccagtatgacgatagcaatatgggccagaacaaagttggcctgagcttctcgctgccgatttatcagggcggaatggttaactcgcaggtgaaacaggcccagtacaactttgttggtgccagtgagcaactggaaagcgcgcatcgtagcgtcgtgcaaaccgtacgttcctccttcaacaacattaatgcttctatcagtagcattaacgcctacaaacaagccgtagtttccgctcaaagctcattagacgcgatggaagcgggctactcggtcggtacgcgtaccattgttgatgtgttggatgcgaccaccacgctgtacaacgccaagcaagagctggcgaatgcgcgttataactacctgattaatcagctgaatattaagtcagccttgggtacgttgaacgagcaggatctgctggcactgaacaatgcgctgagcaaaccggtttccactaatccggaaaacgttgccccgcaaacgccggaacagaatgctattgctgatggttatgcgcctgatagcccggcccccgtcgttcagcaaacatccgcacgcactaccaccagtaacggtcataaccctttccgtaac

SEQ ID NO: 678 - DNA, 504 bp, Escherichia coli
atggttgaggatattttggctccagggttacgggtcgtgttttgcggtatcaaccctgggctttcatccgccgggactggttttccctttgctcatccggcaaatcgcttctggaaggtgatatatcaggccgggtttaccgaccgtcagttgaagccgcaggaggcacagcatctgctggattatcgttgtggcgtcaccaaactggtagaccgtccaacggtgcaagccaatgaagtttcaaagcaggagctgcacgcaggcgggcgtaagctaattgaaaaaatagaagattatcagccacaggcgttggcgattctgggcaaacaagcatatgaacagggattcagccagcgcggtgcacagtgggggaaacaaacgctcaccattggttcgacgcagatttgggtgctgccaaatcccagtggtttaagtcgcgtttcactggagaaactggttgaagcgtatcgcgagctggaccaggcgctggtagtgcgtgggcga

SEQ ID NO: 679 - DNA, 501 bp, Escherichia coli
atgctaattcgagtagaaattcccattgatgcgccgggtattgatgccctgctgcgtcgttcattcgaaagtgatgcggaagcgaagctggttcacgatctgcgtgaagatggctttctgacgctggggctggtggcgacagatgacgaaggtcaggtcattggctatgtggcatttagtccggttgatgtgcagggcgaagacctgcaatgggtcggcatggcaccgttggcggttgatgaaaaataccgtgggcaagggctggcacgccaactggtctatgaaggactcgattcgcttaatgagttcggctatgccgcagtggtgacgctgggcgatccggcgctgtacagtcgtttcggctttgagctggcggcgcatcacgatctgcgttgccgctggccgggcactgaaagcgccttccaggtacatcgtttagcggatgacgcgctgaatggcgtaaccggtctggttgagtatcacgagcacttcaatcgcttt

SEQ ID NO: 680 - DNA, 2670 bp, Escherichia coli
atgacagatgtaacgattaaaacgctggccgcagagcgacagacctccgtggaacgcctggtacagcaatttgctgatgcaggtatccggaagtctgctgacgactctgtgtccgcacaagagaaacagactttgattgaccacctgaatcagaaaaattcaggcccggacaaattgacgctgcaacgtaaaacacgcagcacccttaacattcctggtaccggtggaaaaagcaaatcggtacaaatcgaagtccgcaagaaacgcacctttgtgaaacgcgatccgcaagaggctgaacgccttgctgcggaagagcaagcgcagcgtgaagcggaagagcaagcccgtcgtgaggcagaagaatcggctaaacgcgaggcgcaacaaaaagctgaacgtgaggccgcagaacaagctaagcgtgaagctgctgaacaagcgaaacgtgaagctgcggaaaaagacaaagtgagcaatcaacaagacgatatgactaaaaacgcccaggctgaaaaagcccgccgtgagcaggaagctgcagagctcaagcgtaaagccgaagaagaagcgcgtcgtaaactcgaagaagaagcacgtcgcgttgctgaagaagcacgtcgtatggcggaagaaaacaaatggactgataacgcggaaccgactgaagattccagcgattatcatgtcactacttctcaacatgctcgccaggcagaagacgaaagcgatcgtgaagtcgaaggcggccgtggccgtggtcgtaacgcgaaagctgcgcgtccgaagaaaggcaacaaacacgctgaatcaaaagctgatcgtgaagaagcacgcgcagcagtacgtggcggtaagggcggaaaacgtaaaggttcttcgctgcagcaaggtttccagaagcctgctcaggccgttaaccgtgacgttgtgatcggcgaaaccatcaccgttggcgaactggcgaacaagatggcggttaaaggctctcaggtcatcaaagcgatgatgaaactgggcgcaatggcaaccatcaaccaggttatcgatcaggaaaccgcacagctggttgctgaagagatgggccacaaagttatcctgcgtcgtgaaaacgagctggaagaagcggtaatgagcgaccgtgacacgggtgcagcggctgaaccgcgcgcaccggttgtgaccatcatgggtcacgttgaccacggtaaaacctctctgctggactacattcgttcaacgaaagtggcctctggcgaagcgggcggcattacccagcacattggtgcataccacgttgaaactgaaaacggcatgatcaccttcctggacaccccggggcacgccgcgtttacttcaatgcgtgctcgtggtgcgcaggcaacggacatcgtagtcctggttgttgctgccgacgacggcgtaatgccgcagaccatcgaagcaatccagcacgcgaaagcggcgcaggttccggtggtggttgcagtgaacaagatcgataaaccagaagccgatccggatcgcgttaagaacgaactctcccagtacggcatcctgccggaagagtggggcggtgaaagccagttcgtacatgtgtctgcgaaagcgggtactggtatcgatgagctgctggacgctatcctgctgcaggcggaagttctggagctgaaagcggtacgtaaaggtatggcgagcggtgcggttatcgaatccttcctcgataaaggtcgtggtccggttgctaccgttctggtacgtgaaggtactctgcacaagggcgatatcgttctgtgtggcttcgaatacggtcgtgttcgtgcgatgcgtaacgaactgggtcaggaagtgctggaagcgggtccgtccattccggtggaaatcctcggcctgtctggcgttccggctgcgggtgatgaagttaccgttgtacgtgacgagaagaaagcgcgtgaagttgcactctatcgtcagggtaaattccgcgaagttaaactggcacgtcagcagaaatctaaactcgagaacatgttcgccaacatgaccgaaggcgaagttcacgaagtgaatatcgtcctgaaggcagacgtacagggttccgtggaagctatctccgactccttgctgaaactgtctactgacgaagttaaagtgaagatcatcggttctggcgtaggtggtatcaccgaaaccgacgctaccctggctgcggcgtccaacgccatcctggttggcttcaacgtacgtgctgatgcctctgcacgtaaagtgattgaagcggaaagcctggatctgcgttactactccgtcatctataacctgatcgacgaagtgaaagcggcaatgagcggtatgctgtctccggaactgaaacagcagattatcggtctggcggaagttcgtgacgtgttcaaatcgccgaaatttggtgccatcgcaggttgtatggttaccgaaggtgtggttaaacgtcacaacccgatccgcgttctgcgcgacaacgtggttatctacgaaggcgagctggagtccctgcgccgcttcaaagatgacgttaacgaagtccgtaacggtatggaatgtggtatcggcgttaagaactacaacgatgtccgcactggcgatgtgatcgaagtattcgagatcatcgaaatccaacgtaccatcgct

SEQ ID NO: 681 - DNA, 555 bp, Escherichia coli
atgaaattcaaaacaaacaaactcagccttaatcttgtgcttgccagctcacttctggccgccagcattccggcatttgccgtaaccggagacactgatcagccgatccacattgaatcggaccagcaatctcttgatatgcaaggcaacgtggttacctttaccggtaatgtcatcgtcacccagggcaccatcaaaattaatgccgacaaagtggtcgttacccgtccgggcggcgaacaaggtaaagaagtgattgacggctacggtaaaccggcaacgttctaccagatgcaggacaatggtaaacccgttgaaggtcacgcttcccagatgcactacgaactggcaaaagattttgtcgttctgacgggtaatgcttatctgcagcaggtcgatagcaacattaagggcgataagatcacttacctggtgaaagagcagaaaatgcaggctttcagcgacaaaggtaagcgcgtaaccaccgttctggtgccgtcgcagctgcaggacaaaaacaacaaaggccagaccccggcacagaagaagggtaat

SEQ ID NO: 682 - DNA, 3003 bp, Escherichia coli
atgggcgacgacaccccattcgccgtgctctccagtcagccgcgcattatttacgactacttccgccagcagtttgcccaggtgactaacccgccaatcgacccgctgcgtgaagcgcatgttatgtcgctcgccaccagcattggtcgtgaaatgaacgtcttctgcgaagctgaaggccaggcgcaccgtttaagctttaaatcgccgattctgctctattccgatttcaaacagctcacgacgatgaaagaggagcactaccgcgcagatacactggatatcacctttgacgtcactaaaaccacgctcgaagcgacggtcaaagagctgtgcgacaaagccgaaaaaatggtacgtagcggcactgtgctgctggtgctctccgaccggaatatcgctaaagatcgcctgccggttccggctccgatggcggttggcgcgatccagacccgtctggtcgatcaaagcttgcgttgcgatgccaacatcatcgtcgaaaccgccagcgcccgcgatccgcaccatttcgccgtgttgctgggcttcggtgcgacggctatttatccgtaccttgcctatgaaacgctgggccgcctggtagacacccacgcgattgccaaagattatcgtaccgtgatgctcaactaccgtaacggcatcaacaaaggcttgtacaaaatcatgtccaaaatgggcatctccaccatcgcctcttaccgctgctcgaaactgtttgaagcggtcggtctacacgatgatgtagtgggcctgtgcttccagggcgcggtcagccgcattggcggggcaagctttgaagacttccagcaggatctgctgaatctgtcgaaacgtgcctggctggcgcgtaagcccatcagccagggcggcctgctgaaatatgtgcacggcggcgaataccacgcctacaacccggacgtggtgcgcacactgcagcaggcggtacaaagcggcgagtatagcgactatcaggaatacgcgaagctggttaatgagcgtccggcaaccacgctgcgcgatctgctggcaattacgccgggtgaaaacgcagtcaacattgccgatgttgaaccggcaagcgaactgtttaaacgcttcgataccgctgcgatgtctatcggcgcgttaagcccggaagcccacgaggcgctggcggaagcgatgaacagcatcggcggtaactcgaactccggtgaaggcggcgaagatccggcgcgctacggcactaacaaagtgtcgcgcatcaagcaggtggcgtccggtcgcttcggtgttactccggcgtacctggtcaatgccgacgtcattcagattaaagtcgcccagggcgcgaagccgggcgaaggcggtcaattgccgggtgataaagtcactccttacattgccaaactgcgctattcggtgcccggagtgacgctgatctccccgccgccgcaccacgatatctactctatcgaggatttagcgcagctgatattcgacctcaagcaggtcaatccaaaagcgatgatctccgtgaagctggtttccgaaccgggcgtaggcaccatcgcgactggcgtggcaaaagcttatgccgatttaatcaccatcgcaggctatgacggcggcaccggcgcaagtccgctttcatcggtgaaatacgcaggctgtccgtgggaactcggcctggtggaaacccaacaggcgctggttgccaacggtttacgtcataaaattcgtttgcaggttgatggcggcctgaaaacgggcgttgatatcatcaaagcggcgattctcggcgcagaaagcttcggcttcggcactggcccgatggtggcgctcggctgtaaatatctgcgtatttgccacctgaacaactgcgccacgggtgtagcaactcaggatgacaaactgcgtaagaatcactatcacggcctgccgttcaaggtgaccaattactttgagtttatcgcccgtgaaacccgcgagctgatggcacagcttggcgtaacgcgtctggtggatctgattggtcgcaccgacctgctgaaagagctggacggtttcaccgccaagcagcagaaactggcgctgtcgaagctgctggaaactgccgagccacatgcaggtaaggcactctactgcaccgaaaacaacccgccgtttgataacggcctgctgaacgcgcagttgctgcaacaggcaaaaccgtttgtcgatgaacgccagagcaaaaccttctggttcgatatccgcaacaccgaccgttctgtcggcgcgtcgctttcaggctatatcgcccagacgcacggcgatcagggtctggctgccgatccgatcaaagcatacttcaacggcaccgcaggccagagcttcggtgtgtggaacgcgggcggcgtggaactgtacctgacaggtgatgccaacgactatgtcggtaaaggcatggcgggcggcttaatcgccattcgtcctccggttggctcagccttccgcagccatgaagcaagcattatcggcaacacctgcctgtatggcgcgaccggtggtcgtctgtatgccgcaggccgcgcgggtgaacgtttcggcgtgcgtaactccggtgctatcaccgtggtagaaggcattggcgacaacggctgtgaatatatgacgggcggtattgtctgtattctgggtaaaaccggcgttaacttcggcgcgggcatgactggcggcttcgcttacgttctcgatgaaagcggcgatttccgcaaacgcgttaacccggaactggtcgaggtcttaagcgttgacgatctggcgatccatgaagagcatctgcgtggtcttatcaccgagcatgttcagcatactggctctcagcgcggtgaagagattctggcgaactggtcaaccttcgccactaaatttgcgctggttaaaccgaagtccagtgatgtaaaagcactgctgggtcaccgtagtcgtagcgcagcagagttgcgcgtgcaggcgcag

SEQ ID NO: 683 - DNA, 843 bp, Escherichia coli
gtgaactgtttcgacaggggtaacataatggaaacctatgctgtttttggtaatccgatagcccacagcaaatcgccattcattcatcagcaatttgctcagcaactgaatattgaacatccctatgggcgcgtgttggcacccatcaatgatttcatcaacacactgaacgctttctttagtgctggtggtaaaggtgcgaatgtgacggtaccttttaaagaagaggcttttgccagagcggatgagcttactgaacgggcagcgttggctggtgctgttaataccctcaagcggttagaagatggacgcctgctgggtgacaataccgatggtataggtttgttaagcgatctggaacgtctgtcttttatccgtcctggtttacgtattctgctcatcggcgctggtggagcatctcgcggcgtactactgccactcctttccctggactgtgcggtgacaatcactaatcggacggtatctcgcgcggaagagttgactaaattgtttgcgcacactggcagtattcaggcgttgggtatggacaaactggaaggtcatgagtttgatctcattattaatgcaacatccagtggcatcagtggtgatattccggcgatcccgtcatcgctcattcatccaggcatttattgctatgacatgttctatcagaaaggaaaaactccttttctggcatggtgtgagcagcgaggctcaaagcgtaatgctgatggtttaggaatgctggtggcacaggcggctcatgccttccttctttggcatggcgttctgcctgatgtagaaccggtcatcaaactattgcaacaggagttgtcagcg

SEQ ID NO: 684 - DNA, 312 bp, Escherichia coli
atggcagcgaaaatccgtcgtgatgacgaagttatcgtgttaaccggtaaagataaaggtaaacgcggtaaagttaagaatgtcctgtcttccggcaaggtcattgttgaaggtatcaacctggttaagaaacatcagaagccggttccggccctgaaccaaccgggtggcatcgttgaaaaagaagccgctattcaggtttccaacgtagcaatcttcaatgcggcaaccggcaaggctgaccgtgtaggctttagattcgaagacggtaaaaaagtccgtttcttcaagtctaacagcgaaactatcaag

SEQ ID NO: 685 - DNA, 1236 bp, Escherichia coli
atgaagcaatggatagccgcactactgttgatgctgatacccggcgtacaggcggcaaagccgcaaaaagtgacgctgatggtggatgacgttccggtagctcaggtgttgcaggcgctggctgaacaggagaagttgaacctggtggtgtcgccagacgtcagcggtacggtgtcgttacatctaacagatgttccctggaagcaagcactacaaactgtagtgaaaagcgccggactgataacgcgtcaggagggcaacattctctcggtgcattccgttgcctggcagaatgacaatatcgcccgtcaggaggcggagcaggcgcgggcgcaggcaaatctgccgctggaaaatcgcaatattactctgcaatacgccgacgccggagaactggcgaaagcgggggagaagctactgagtgccaaagggagtatgaccgtcgataaacgcaccaatcgccttttgctgcgagataacaaaacggcgttaagcgcgcttgaacagtgggtagcgcaaatggatctgccggtcgggcaggttgagctgtcggcgcatattgtcaccattaatgaaaaaagtttgcgtgagttaggcgtgaaatggacgttggctgatgcgcaacacgctggtggcgttgggcaagtcaccacgcttggcagcgacctctccgtagcgacggcgacaacgcatgtcggttttaacattggacgcatcaacggacgtttactggatcttgagctttccgcgctcgaacaaaaacagcagctggatattatcgccagtccgcgtctgctggcctcacatcttcagcctgccagcattaaacaggggagcgaaattccatatcaggtttccagcggggaaagtggcgcgacgtcggtggaatttaaagaggccgtcctggggatggaagttacgcccacggtgttacaaaaaggtcgcatccggctgaaattacacatcagccagaacgttccggggcaggtgctacagcaggccgatggcgaagtgctggcgattgataagcaggagatcgaaacgcaggtcgaggtcaaaagcggagaaacgttggcgctgggtggcatttttacccgtaaaaataaatcgggtcaggatagcgtaccgttgcttggcgacattccctggttcgggcaattatttcgtcatgacggaaaagaagatgaacgacgcgagttagtggtgtttatcacgccacgactggtttccagtgag

SEQ ID NO: 686 - DNA, 1866 bp, Escherichia coli
gtggcagataccaaagccgcgctggacggcgcgcgctatatcctgatggaacggtttgccgaagatgccgcgctgctggcgaaagtgcgtgattatctgtggaagaacgcgcatttggtttctacggtggtgagtggtaaagaagaggaaggggcgaaattccgcgactatttcgatcatcacgaaccgctgtcaacggtgccttctcaccgcgcgctggcgatgttccgtggtcgtaacgaaggcatacttcagctttcgctgaatgccgatccgcagttcgaagagccgccgaaagagagctattgcgagcaaatcatcatggatcaccttggcctgcgcctgaacaatgccccggcggatagctggcgcaaaggcgtggtgagctggacgtggcgcatcaaggtgctgatgcatctggaaaccgaactgatgggcaccgtgcgcgaacgcgcggaagatgaagcaatcaacgtctttgcccgtaacctgcacgatctgctgatggcggccccagccggactgcgtgcaacgatgggcctcgatccgggtctgcgtaccggggtaaaagtagcggtggtcgatgcaactggcaaactggtggcgaccgataccatttacccgcacaccggacaagccgcaaaagcagcgatgaccgttgctgccctgtgtgaaaagcataatgttgaactggtggcgatcggtaacggtacagcttcccgcgaaactgagcgtttctatctcgacgtgcagaagcagttcccgaaagtgaccgcgcagaaagtgatcgtcagcgaagctggcgcgtcggtttactcggcttccgagctggcagcgcaggagttcccggatctcgacgtttcgctgcgtggcgcggtgtctatcgcccgtcgtttgcaggatccgctggcggagctggtgaaaatcgatccgaaatctatcggcgtaggtcagtatcagcatgacgtcagccagacgcagctggcccgcaaactggatgcagtagtagaagactgcgtaaacgccgttggtgttgatctcaacaccgcttctgttccgctgttaactcgcgtggcgggcctgacgcgcatgatggcgcaaaacatcgtggcctggcgcgatgagaacggtcagttccagaaccgtcagcaactgctgaaagtgagccgtctggggccgaaagccttcgagcaatgtgcgggcttcctgcgtattaaccacggcgataacccgctggacgcctctaccgttcacccggaagcctatccggtggtggaacgcattctggcagcaacacagcaggcactgaaagatctgatgggtaacagcagcgagctgcgtaacctgaaagcgtctgactttactgatgagaaattcggtgtgccgacagtaactgacatcatcaaagagctggaaaaaccgggtcgcgatccgcgtccggaatttaaaaccgctcagtttgctgatggcgtcgagacaatgaacgacctgcaaccgggtatgatcctcgaaggcgcggtgaccaacgtcactaactttggcgcgtttgtcgatatcggcgtgcatcaggacggcctggttcacatctcttcattgtcgaataagtttgtggaagatccgcataccgtggtgaaagcgggcgacattgtgaaggtgaaagtgctggaagtggatcttcagcgtaaacgtatcgccctgaccatgcgtctggacgagcagcctggcgaaaccaacgcccgtcgcggcggcggtaatgaacgcccgcaaaacaaccgcccggcagccaaaccgcgtgggcgtgaagcgcagcctgccggtaacagcgcgatgatggatgcgctggcggcggcaatgggcaaaaaacgt

SEQ ID NO: 687 - DNA, 2079 bp, Escherichia coli
atggaaagcaaacgtctggataatgccgcgctggcggcggggattagccccaattacatcaatgcccacggtaaaccgcagtcgattagcgccgaaaccaaacggcgtttgcttgacgcgatgcatcaacgtaccgccacgaaagtggcggtaacgccagtcccgaatgtcatggtttataccagcggcaaaaaaatgccgatggtggtggagggcagcggcgaatatagctggctgctgaccaccgaagaaggaacgcagtacaaaggccatgtaacggggggcaaagcgttcaatctaccgacgaagctgccggaaggttatcacacgctgacactcacccaggacgaccagcgcgcgcattgccgggtgattgtcgccccgaaacgctgttacgaaccgcaggcgttgctgaacaaacaaaagctgtggggtgcctgcgttcagctttatacgctgcgatcggaaaaaaactggggtattggggattttggcgatctcaaagcgatgctggtggatgtggtaaaacgtggcgggtcgttcatcggtctgaacccgattcatgcgctctatccggcaaatccggaaagtgccagcccgtatagcccgtcttctcgccgttggctgaatgtgatttatatcgacgttaacgccgttgaagatttccatcttagcgaagaggctcaggcctggtggaagttgccgaccacgcaacagacgctgcaacaggcgcgggatgccgactgggtcgattactccacggttaccgccctaaaaatgacagcattacgaatggcgtggaaaggtttcgcgcaacgtgatgatgaacagatggccgcgtttcgccagtttgttgcagagcaaggcgacagcctgttctggcaggcggcgtttgacgcactacatgcccagcaagtgaaagaggacgaaatgcgctggggctggcctgcatggccagagatgtatcagaacgtggattcaccagaagtgcgccagttctgcgaagaacatcgcgatgacgttgatttttatctctggttgcagtggctggcttacagccagtttgccgcctgctgggagataagccagggctatgaaatgccgattggcttgtatcgtgacctggccgttggtgtagcagagggtggagcagaaacctggtgcgaccgggagttgtattgcctgaaagcgtcggttggcgcgccgccggatatcctcggcccgttggggcagaactggggattgccgccaatggacccgcatattatcaccgcgcgtgcctatgaaccgtttatcgagctgttgcgtgccaatatgcaaaactgcggcgcattacgaattgaccatgtgatgtcgatgctgcgtttgtggtggataccgtatggcgagacggcagatcagggggcatatgttcactatccggtggatgatctgctctcgattctggcactcgaaagtaagcgtcatcgctgtatggtgattggtgaagatctcggtaccgtaccggtagagattgtcggtaagctgcgcagcagcggtgtgtactcctacaaagtgctctatttcgaaaacgaccacgagaagacattccgctcaccgaaagcgtacccagagcagtcgatggcggttgcggcgacacacgacctgcctacgctacgcggctactgggagagcggggatctaacgctgggcaaaacgctggggttgtatccggatgaagtgatactgcgcggtctgtatcaggatcgcgaactggcgaagcaaggactactggatgctctgcataaatatggttgtctgccaaaacgtgccgggcataaggcatcgttgatgtcgatgacgccgacgctgaatcgtggcttacagcgctacatcgccgatagcaacagcgccctgttaggactacagccggaagactggctggatatggctgaaccggtgaatattcccggcaccagttaccagtataaaaactggcggcgcaagctctccgcaacgcttgaggcgatgtttgccgatgatggcgtgaacaagttgctgaaggatttggacagacggcgcagagcggcagcgaagaag

SEQ ID NO: 688 - DNA, 582 bp, Escherichia coli
atgatcaaacccacattctggcgagcgttcgccctgaccgctacgcttatcctcaccggctgtagccactcgcaaccggaacaggaaggtcgcccacaggcgtggctgcaacctggcacgcgcatcacgctgccggcaccagggatttcgcccgccgttaattcccagcaactattgagcggcagcttcaacggcaaaacccagtctctgctagtgatgcttaacgccgacgaccagaaaatcacccttgccgggctgtcgtcggtcggcattcgtctgtttctggtgacctacgatgcgcaagggctacgcgccgagcaatccatcgtcgtcccacagttgccgcccgcaagtcaggtgctggctgacgtgatgcttagccactggccgattagcgcctggcaaccgcaactccccgctggatggacgcttcgcgacaacggtgacaaacgcgaactgcgtaacgccagcggcaaactggtcacggaaatcacctatctgaatcgccagggaaaacgcgtgccaatcagcattgaacagcatgtctttaaataccacatcaccattcaatatttaggtgac

SEQ ID NO: 689 - DNA, 762 bp, Escherichia coli
atgccgcaacagattgaactacgtaatatcgcgctacaggccgcgcaaccgctggtgcacggcgtatcgttaactctgcaacgcgggcgcgtgctggcgttagtcggcagtagcggcagcgggaaatcattaacctgcgccgccgcactgggcattctgcccgcaggcgttcgccagacggcgggggaaattttagccgatggcaaaccggtttctccctgcgccctgcgcggcatcaaaattgccaccatcatgcagaacccgcgcagcgcctttaatccgcttcacaccatgcacacccacgcgcgggaaacctgcctggcgttagggaaacccgccgatgacgccacgcttaccgctgctttagaagcggtggggttggaaaacgccgcgcgcgtgttgaagctgtacccgttcgagatgagcggcggcatgttgcagcgcatgatgattgcgatggcggtgttgtgtgaatcgccgtttatcatcgccgatgaaccgaccaccgatctcgacgtggtagcacaggcgcgcatcctcgatctgctggaaagcattatgcaaaaacaagcgccgggaatgctgctggtgacccatgatatgggcgttgtggcgcgtctggcggatgacgtggcggtgatgtcacacggtaaaattgtcgaacagggcgatgtagaaacgctgtttaatgcccccaaacatgcggtaacgcgcagcctggtttccgctcatctcgccctctacggtatggagctggcatca

SEQ ID NO: 690 - DNA, 804 bp, Escherichia coli
atgactttacttaacgtctccgacctttcccatcactatgcgcacggtggatttagcggcaaacatcaacaccaggcggtgctgaataacgtttctttgactctgaaaagcggcgaaaccgtcgctctgctggggcgcagcggctgcggaaaaagcactctcgcgcggctgctggtaggcttagagtctccctcacaagggaatattagctggcgcggcgaaccgttggcaaagctcaatcgcgcccagcgtaaagcgttccgccgcgatattcagatggtatttcaggactccatcagcgccgtgaatccgcgcaaaaccgtgcgcgagatcctgcgcgagccgatgcgccacctgctatcgctaaaaaaatcggaacaactggcacgcgccagcgaaatgctgaaggcggtcgatctcgatgacagcgttctagacaaacgcccaccgcagttaagcggcggtcagctccagcgcgtctgcctggctcgcgcgctggcggtcgaaccgaaactactgattctggatgaagccgtttctaaccttgatctcgtgttacaggcgggcgtcattcgcctgctgaaaaagctacaacaacagtttggcactgcctgcctgttcatcactcatgacttacgcctggtggaacgcttttgccagcgagtgatggtgatggacaacgggcaaatcgtcgaaacccaggtggtgggagataaattaaccttttcctctgacgccggacgtgtgctacaaaacgcggtattacccgcataccccgtgcgccgtcgcgccacagaaaaggtt

SEQ ID NO: 691 - DNA, 3471 bp, Escherichia coli
atgcgcaaattcacactaaacatattcacgctttctctcggtctggccgtcatgccgatggtcgaggcagcaccaaccgctcagcaacagttgctggagcaagttcggttaggcgaagcgacccatcgtgaagacctggtgcaacagtcgttgtatcgtctggaacttattgatccgaataacccggacgtcgttgccgcccgtttccgttctctgttacgtcagggcgatattgatggcgcgcaaaaacagctcgatcggctgtcgcagttagcgccgagttcaaatgcgtataaatcgtcgcggaccacaatgttgctttccacgccggatggtcgtcaggcactgcaacaggcaagattgcaggcgacgaccggtcatgcagaagaagctgtggcgagttacaacaaactgttcaacggtgcgccgccggaaggtgacattgccgtcgagtactggagtacggtggcgaaaattccggctcgccgtggcgaagcgattaatcagctaaaacgcattaatgcggatacgccgggcaatacgggcctacaaaacaatctggcgctattgctgtttagtagcgatcgccgtgacgaaggttttgccgtcctggaacagatggcgaaatcaaacgccgggcgcgaaggggcctctaaaatctggtacgggcagattaaagacatgcccgtcagcgatgccagtgtgtcggcgctgaaaaaatatctctcgatctttagtgatggcgatagcgtagctgcggcgcaatcgcaactggcagaacagcaaaaacagctggccgaccctgctttccgcgctcgtgcgcaaggtttagcggcggtggactctggtatggcgggtaaagccattcccgaactacaacaggcagtgcgggcgaacccgaaagacagtgaggctctgggggcgctgggccaggcgtattctcagaaaggcgatcgcgccaatgcggtggcgaatctggaaaaagccctcgccctggatccgcacagcagcaacaacgacaaatggaacagtctcctgaaagtaaaccgctactggctggcgatccagcagggcgatgctgcgctgaaagccaataatcctgaccgggcagaacgcctgttccagcaggcgcgtaatgtcgataacaccgacagctatgcagtgctggggctgggcgatgtggcgatggcgcgaaaagattatcccgccgccgaacgttattatcagcagaccttgcgtatggacagcggcaacactaacgccgtgcgcgggctggcgaatatataccgccagcaatcgccagaaaaagctgaagcgtttatcgcctcgctctctgccagtcagcggcgaagcattgatgatatcgaacgcagcctgcaaaacgaccgtctggcacagcaggcagaggcactggaaaaccagggcaaatgggcgcaggcggcagcacttcagcggcaacgactggcgctggaccccggcagcgtatggattacttaccgactttcgcaggatctctggcaggccggacaacgcagccaggccgatacgttaatgcgtaatctggcgcagcagaagccgaacgacccggagcaggtttacgcttacgggctgtatctctctggtcatgaccaggacagagcggcgctggcgcatatcaacagcctgccgcgcgcgcagtggagcagcaatattcaggagctggttaatcgactgcaaagcaatcaggtactggaaaccgctaatcgcctgcgagaaagcggcaaagaagctgaagcggaagcgatgctgcgccagcaaccaccttccacgcgcatagacctcacgctggctgactgggcgcaacaacgacgtgattacaccgccgctcgcgctgcatatcagaatgtcctgacgcgggagccaactaacgccgatgccattcttggtctgacggaagtggatattgctgccggtgacaaagcggcggcacgtagccagctggcgaaactgcccgctaccgataacgcctcgctgaacacacagcggcgcgtggcgctggcacaggcgcagcttggcgataccgcagcggcgcagcagacgtttaataagttgatcccgcaggcaaaatctcagccgccgtcgatggaaagcgcgatggtactgcgcgacggtgcgaagtttgaagcgcaggcgggcgatccaacgcaggcgctggaaacctacaaagacgccatggttgcatccggtgtgaccacgatgcgtccacaggataacgacacctttacccgactgacccgcaatgacgagaaagatgactggctgaaacgcggcgtgcgcagcgatgcggcggacctctatcgtcagcaggatcttaatgtcaccctcgagcacgattactggggttcgagcggcaccggtggttactccgatctgaaagcgcacaccactatgttgcaggtggatgcgccgtattctgacgggcggatgttctttcgtagtgatttcgtcaatatgaacgtcggcagtttttccactaatgccgatggcaaatgggatgacaactggggcacctgtacattacaagactgtagcggcaaccgcagccagtcggattccggtgccagcgtggcggtcggctggcgaaatgacgtctggagctgggatatcggcactacgccgatgggcttcaatgtggtggatgtggtcggcggcatcagttacagcgatgatatcgggccgctgggttacaccgttaacgcccatcgtcggcccatctccagttctttgctggcctttggcgggcaaaaagactccccgagcaataccgggaaaaaatggggcggcgtgcgtgccgacggcgtggggctaagcctgagctacgataaaggtgaagcaaacggcgtctgggcatcgcttagcggtgatcagttaaccggtaaaaatgtcgaagataactggcgcgtgcgctggatgacgggctattactataaggtcattaaccagaacaatcgccgcgtcaccatcggcctgaacaacatgatctggcattacgacaaagacctgagtggctactcacttggtcagggcggttactacagcccgcaggaatacctgtcgtttgccataccggtgatgtggcgggagcggacggaaaactggtcgtgggagctgggggcgtctggctcgtggtcgcattcacgcaccaaaaccatgccgcgttatccgctgatgaatctgatcccgaccgactggcaggaagaagctgcgcggcaatcgaacgatggcggcagcagtcagggctttggctacacggcgcgggcattacttgaacgacgtgttacttccaactggtttgtcggcacggcaattgatatccagcaggcgaaagattacgcacccagccatttcctgctctacgtacgttattccgccgccggatggcagggtgacatggatttaccgccgcagccgctgataccttacgccgactgg

SEQ ID NO: 692 - DNA, 2337 bp, Escherichia coli
atgaaaagaaaactattctggatttgtgcagtggctatggggatgagtgcgttcccctctttcatgacgcaggcgacgccagcaacgcaaccactgatcaatgctgagccagctgtagccgcccagacggaacaaaatccgcaggtgggacaagtgatgccaggcgtgcagggcgctgatgcgccagtcgtggcgcagaacggtccttcgcgtgatgtgaagctgacctttgcgcaaattgcgccgccgccgggcagcatggtgctacgtggcattaacccgaacggcagcattgagtttggtatgcgcagcgatgaagtggtgacgaaggcgatgctcaatctcgaatacacgccatcgccatcgttactgcctgtccagtcgcagttaaaggtttatctcaatgatgaactgatgggcgtgctgccagtgaccaaagaacagttgggtaaaaaaacgctggcacaaatgcccattaacccgctgtttattactgatttcaaccgtgtgcggctggagtttgtcggccattatcaggacgtgtgcgaaaacccggccagcaccacgctttggctggatgttgggcggagcagtggactggatttgacctatcagaccctgaatgtgaagaatgacctgtcacacttcccggtaccattctttgacccgcgtgataaccgtactaacaccttgccgatggtctttgcgggtgcgccggatgttgggctgcaacaagcatctgccattgttgcctcgtggtttggttcgcgttctggctggcgtgggcagaacttcccggtgctctataaccaactgccggatcgcaatgccattgtctttgcaaccaacgacaaacggccggacttcctgcgcgatcatccggcggtaaaagccccggtgattgagatgatcaaccatccgcagaatccttacgtcaaactgctggtggtgtttggtcgtgacgacaaagacctgttgcaggcagcgaaaggtatcgctcagggtaacattctgttccgtggtgaaagcgtggtagtgaatgaagtgaaaccgctgctaccgcgtaagccgtacgatgcgccgaactgggtgcgtaccgatcgtccggtcacctttggtgaactgaaaacctatgaagaacagttgcaatccagcggtcttgagccagcagcgattaatgtttcgctaaacctgccgccagatctctacttgatgcgtagtaccggcattgatatggatatcaactatcgctacaccatgccgccggtgaaagacagttcgcggatggatatcagcctgaataaccagttcctgcaatcattcaatctgagcagcaaacaggaggcgaaccgcctgctgctgcggattccggtattacaaggtttgctggatggcaaaacggatgtctctattccggcgctgaaactgggcgcgaccaaccagctgcgctttgactttgagtatatgaacccgatgcctggcggttcggtggataactgtattaccttccagccggtgcagaatcatgtggtgattggtgacgactccaccatcgacttctcgaagtattaccacttcatcccgatgccggatctacgcgcctttgctaacgcgggcttcccgttcagccggatggcggatctgtcgcaaaccatcaccgtgatgccgaaaacgcctaacgaagcacagatggaaaccttgctgaatactgttggttttatcggcgcacagacgggcttcccggcgattaatctgacggtgaccgatgatggcagcaccattcagggcaaagatgccgacatcatgatcatcggtggtatcccggacaaactgaaagacgacaagcagatcgacctgttggtgcaggcgaccgaaagctgggtgaaaacgccgatgcgccagaccccgttccccggcattgttccggacgagagcgatcgcgcggcagaaacccagtcaacgctgacctcttccggtgcgatggcggcggtgattggcttccagtcgccgtataacgaccagcgcagcgtgattgcgctgctggcagatagcccacgcggttatgaaatgcttaacgatgcggtgaacgatagcggcaaacgcgccaccatgttcggttcggtcgcggtgatccgcgagtccggtatcaatagcctacgcgttggcgacgtctattacgttggccatctgccgtggttcgaacgcttatggtatgcgctggcaaaccatccgattctgctggcggtgctggcggcaatcagcgtcgtgctgctggcatgggtactgtggcgtctgctgcgtattatcagccgtcgtcgtcttaacccggataacgag

SEQ ID NO: 693 - DNA, 2616 bp, Escherichia coli
atgagtatcctgacccggtggttgcttatcccgccggtcaacgcgcggcttatcgggcgttatcgcgattatcgtcgtcatggcgcgtcggctttcagcgcgacgctcggctgtttttggttgatcctggcctggatttttattccgctggagcacccgcgctggcagcgtattcgcgcagaacataaaaacctgtatccgcatatcaacgcctcgcgtccgcgtccgctggatccggtccgttatctcattcaaacatgctggttactgatcggtgcatcgcgcaaagaaacgccgaaaccgcgcaggcgggcattttcaggtctgcaaaatattcgtggacgttaccatcaatggatgaacgagctgcctgagcgcgttagccataaaacacagcatcttgatgagaaaaaagagctcggccatttgagtgccggggcgcggcggttgatcctcggtatcatcgtcaccttctcgctgattctggcgttaatctgcgttactcagccgtttaacccgctggcgcagtttatcttcctgatgctgctgtggggggtagcgctgatcgtacggcggatgccggggcgcttctcggcgctaatgttgattgtgctgtcgctgaccgtttcttgccgttatatctggtggcgctacacctctacgctgaactgggacgatccggtcagcctggtgtgcgggcttattctgctgttcgccgaaacgtacgcgtggattgtgctggtgctcggctacttccaggtagtatggccgctgaatcgtcagccggtgccattgccgaaagatatgtcgttgtggccgtcggtggatatctttgtcccgacttacaacgaagatctcaacgtggtgaaaaataccatttacgcctcgctgggtatcgactggccgaaagacaagctgaacatctggatccttgatgacggcggcagggaagagtttcgccagtttgcgcaaaacgtgggggtgaaatatatcgcccgtaccactcatgaacatgcgaaagcgggcaacatcaacaatgcgctgaaatatgccaaaggcgagttcgtgtcgattttcgactgcgaccacgtaccaacgcgatcgttcctgcaaatgaccatgggctggttcctgaaagaaaaacaactggcgatgatgcagacgccgcaccacttcttctcaccggacccgtttgaacgcaacctgggacgtttccgtaaaacaccgaacgaaggcacgctgttctatggtctggtgcaggatggcaacgatatgtgggacgccactttcttctgcggttcctgtgcggtgattcgccgtaagccgctggatgaaattggcggcattgctgtcgaaaccgtgactgaagatgcgcatacttctctgcgtttgcaccgtcgtggctatacctccgcgtatatgcgtattccgcaggcggcggggctggcgaccgaaagtctgtcggcgcatatcggtcagcgtattcgctgggcgcgcgggatggtgcaaatcttccgtctcgataacccgctcaccggtaaagggctgaagtttgctcagcggctatgttacgtcaacgccatgttccacttcttgtcgggcattccacggctgatcttcctgactgcgccgctggcgttcctactgcttcatgcctacatcatctatgcgccagcgttgatgatcgccctgttcgtgctgccgcatatgattcatgccagcctgaccaactcgaagatccagggcaaatatcgccactctttctggagtgaaatctacgaaacggtgctggcgtggtatatcgcaccaccgacgctggtggcgctgattaacccgcacaaaggcaaatttaacgttaccgccaaaggtggactggtggaagaagagtacgtcgactgggtgatctcgcggccctacatcttccttgttctgctcaacctggtgggcgttgcggtaggcatctggcgctacttctatggcccgccaaccgagatgctcaccgtggtcgtcagtatggtgtgggtattctacaacctgattgttcttggcggcgcagttgcggtatcggtagaaagcaaacaggtacgccgatcgcaccgcgtggagatgacgatgcccgcggcaattgcccgcgaagatggtcacctcttctcgtgtaccgttcaggatttctccgacggtggtttggggatcaagatcaacggtcaggcgcagattctggaagggcagaaagtgaatctgttgcttaaacgcggtcagcaggaatacgtcttccccacccaggtggcgcgcgtgatgggtaatgaagttgggctgaaattaatgccgctcaccacccagcaacatatcgattttgtgcagtgtacgtttgcccgtgcggatacatgggcgctctggcaggacagctacccggaagataagccgctggaaagtctgctggatattctgaagctcggcttccgtggctaccgccatctggcggagtttgcgccttcttcggtgaagggcatattccgtgtgctgacttctctggtttcctgggttgtatcgtttattccgcgccgcccggagcggagcgaaacggcacaaccatcggatcaggctttggctcaacaa

SEQ ID NO: 694 - DNA, 1689 bp, Escherichia coli
atgctgatccagcagaacagcgaaatcatcaatcagcttgccggtaacaccagcgaaacctacatcgaagataacggtgcgggcattaactatgtacgtaccaacgacaacggcttagcgttcaacgatgccagcgcttcaggtattggcgctacggctgtgggttataacgctgtcgcctcaggcgaaagcagcgtagccattggtcaaggtagcagcagcaacgttgatacgggtatcgccctgggtagcagttccgtttccagccgtgtaatagttaaaggttctcgtgacaccagcgtgtcggaagaaggtgttgtgattggttatgacaccacggatggcgaactacttggtgcgttgtctattggtgatgacggtaaatatcgtcaaatcatcaacgtagccgatggttccgaagcccatgacgccgttacggttcgccagttgcaaaatgccattggtgcagtcgctaccacgccgaccaaatacttccacgccaactcaacggaagaagattcactggcagtaggtgaagactcgctagcaatgggcgcgaaaactatcgttaatggtaatgcgggtattggtatcggttatggtgcctacgtggacgcgaatgcacttaatggcattgctatcggtagcaacgcgcgtgcaaaccatgcaaacagcattgctatgggtaatggctcacagacgactcgtggtgctcaaactggctacgccgcctacaacatggacgcaccgcagaactctgtgggtgagttctctgtcggcagtgaagacggtcaacgtcagatcaccaacgtcgcggctggttcggctgataccgatgcggttaacgtgggtcagttgaaagtaacggacgcgcaggtttcccagaatacccagagcattactaacctgaacaatcaggtcactaatctggatactcgcgttactaatatcgaaaacggtattggcgacattgtaaccaccggtagcaccaagtacttcaagaccaacaccgatggcgtagatgccaacgcgcagggtaaagatagtgttgcgattggttctggttccattgctgccgctgacaacagcgtcgcgctgggtacaggctccgtggccaacgaagaaaataccatctctgtgggttcttctaccaaccagcgtcgtatcaccaacgttgctgcaggtgttaatgccaccgatgcggttaacgtttcgcagctgaagtcttctgaggcaggcggcgttcgttacgacaccaaagctgatggctctgtagactacagcaacatcactctcggtggtggtaatggcggtacgactcgcatcagcaacgtctccgctggcgtgaacaacaacgacgcagtgaactatgcgcagctgaagcaaagcgtgcaggaaacgaagcaatataccgatcagcggatggttgagatggataacaaactgtccaaaaccgaaagcaagttgagcggtggtatcgcttctgcaatggcaatgaccggtctgccgcaggcttacactccaggtgccagcatggcctctattggtggcggtacttacaacggtgaatcggctgttgctttaggtgtgtcgatggtgagcgccaatggtcgttgggtctacaaattacaaggtagtaccaatagccagggtgaatactccgccgcactcggtgccggtattcagtgg

SEQ ID NO: 695 - DNA, 1248 bp, Escherichia coli
atgatggcgggacccgttttgtatcaggaccgcgccatgaaacagataacctttgctccccgtaatcacctgctcaccaataccaatacctggacgcccgacagccagtggctggtatttgacgtgcgtccttctggcgcgtcgtttaccggcgagaccattgagcgtgtgaatatccatactggagaggtcgaggttatctatcgcgcgtcacagggcgcgtacgtcggcgtggtgaccgttcatccgaagtcagagaaatatgttttcatccacggaccggaaaatcctgatgaaacatggcattacgacttccatcatcggcgcggagtgattgttgaaggcggcaaggtgagcaatctcgatgcaatggatattaccgcgccgtacaccccaggagcgctgcgcggcggcagccatgtgcatgtctttagcccgaacggagaaagggtgagctttacctataacgaccatgtaatgcatcaactcgattcggcgctggatttgcgaaacgtcggtgttgcggcaccgtttggcccggtcaacgtacaaaagcagcatccgcgtgaatacagcggtagccactggtgcgtgctggtgagtaaaaccacgcccacgccgcagcctggcagcgatgaaatcaatcgtgcttatgaagaaggatgggtaggaaatcacgcgctggcgtttattggcgacacactttcgccaaagggcgagaaagtgccggagctatttatcgttgagttaccgcaagatgaagctggctggaaagcggcaggtgatgcgccattaagtggaacggaaacaaccctgcccgcgccaccgcgtggcgtcgtgcagcgacgtttaacctttacccaccatcgggcttatccggggttagtcaacgtcccgcgccactgggtgcgctgtaatccgcagggtacgcaaatcgcgtttttaatgcgtaatgataacggcattgtgcaactgtggcttatctcgccacagggcggcgagccgcgccagttaacccataacaaaacggatattcagtctgcatttaactggcatccatcaggagaatggttgggctttgtgctggataatcgaattgcttgtgcccatgcgcaaagcggcgaggttgagtatttaaccgaaaaccacgccaatccaccttctgcggacgccgtggtcttctcgccggatggtcaatggctggcgtggatggaaggcggccagctgtggatcaccgaaactgatcgc

SEQ ID NO: 696 - DNA, 1380 bp, Escherichia coli
atggctactggaaagattgtccaggtaatcggcgccgtagttgacgtcgaattccctcaggatgccgtaccgcgcgtgtacgatgctcttgaggtgcaaaatggtaatgagcgtctggtgctggaagttcagcagcagctcggcggcggtatcgtgcgtaccatcgcaatgggttcctccgacggtctgcgtcgcggtctggatgtaaaagacctcgaacacccgatcgaagtcccggtaggtaaagcgactctgggccgtatcatgaacgtactgggtgaaccggtcgacatgaaaggcgagatcggtgaagaagagcgttgggcgattcaccgcgcagcaccttcctacgaagagctgtcaaactctcaggaactgctggaaaccggtatcaaagttatcgacctgatgtgtccgttcgctaagggcggtaaagttggtctgttcggtggtgcgggtgtaggtaaaaccgtaaacatgatggagcttattcgtaacatcgcgatcgagcactccggttactctgtgtttgcgggcgtaggtgaacgtactcgtgagggtaacgacttctaccacgaaatgaccgactccaacgttatcgacaaagtatccctggtgtatggccagatgaacgagccgccgggaaaccgtctgcgcgttgctctgaccggtctgaccatggctgagaaattccgtgacgaaggtcgtgacgtactgctgttcgttgacaacatctatcgttacaccctggccggtacggaagtatccgcactgctgggccgtatgccttcagcggtaggttatcagccgaccctggcggaagagatgggcgttctgcaggaacgtatcacctccaccaaaactggttctatcacctccgtacaggcggtatacgtacctgcggatgacttgactgacccgtctccggcaaccacctttgcgcaccttgacgcaaccgtggtactgagccgtcagatcgcgtctctggggatctacccggccgttgacccgctggactccaccagccgtcagctggacccgctggtggttggtcaggaacactacgacaccgcgcgtggcgttcagtccatcctgcaacgttatcaggaactgaaagacatcatcgccatcctgggtatggatgaactgtctgaagaagacaaactggtggtagcgcgtgctcgtaagatccagcgcttcctgtcccagccgttcttcgtggcagaagtattcaccggttctccgggtaaatacgtctccctgaaagacaccatccgtggctttaaaggcatcatggaaggcgaatacgatcacctgccggagcaggcgttctacatggtcggttccatcgaagaagctgtggaaaaagccaaaaaactt

SEQ ID NO: 697 - DNA, 759 bp, Escherichia coli
atgtccaagtctgatgtttttcatctcggcctcactaaaaacgatttacaaggggctacgcttgccatcgtccctggcgacccggatcgtgtggaaaagatcgccgcgctgatggataagccggttaagctggcatctcaccgcgaattcaccacctggcgtgcagagctggatggtaaacctgttatcgtctgctctaccggtatcggcggcccgtctacctctattgctgttgaagagctggcacagctgggcattcgcaccttcctgcgtatcggtacaacgggcgctattcagccgcatattaatgttggcgatgtcctggttaccacggcgtctgttcgtctggatggcgcgagcctgcacttcgcaccgctggaattcccggctgtcgctgatttcgaatgtacgactgcgctggttgaggctgcgaaatccattggcgcgacgactcacgttggcgtgacggcttcttctgataccttctacccaggtcaggaacgttacgatacttactctggtcgcgtagttcgtcactttaaaggttctatggaagagtggcaggcgatgggcgtaatgaactatgaaatggaatctgcaaccctgctgaccatgtgtgcaagtcagggcctgcgtgccggtatggtagcgggtgttatcgttaaccgcacccagcaagagatcccgaatgctgagacgatgaaacaaactgaaagccaagcggtgaaaatcgtggtggaagcggcgcgtcgtctgctg

SEQ ID NO: 698 - DNA, 957 bp, Escherichia coli
gtggcacaacgagattatgtacgccgcagccaaccggcaccttcgcggcgaaaaaagagcacctcacggaaaaagcaacgaaatctgcctgcggtttctcccgctatggtcgctattgctgccgccgttcttgtgacctttatcggtggtctgtacttcattacgcatcacaagaaagaagagtccgagacgctgcaaagccagaaagtgaccggaaacggactaccaccaaaaccagaagaacgctggcgctacatcaaagagctggaaagtcgccagccaggtgtgcgtgcgcctacagaaccttctgccggtggtgaagtgaaaacgccggagcaactaacaccagaacaacgccagctccttgagcaaatgcaggctgatatgcgccagcagccaacgcagttggttgaagttccgtggaatgaacagacgccggaacagcgtcagcaaacgctacagcgccagcgtcaggcgcagcaattagcggagcagcaacgcctggctcagcagtcgcgtacgactgaacaaagctggcagcagcagacgcgtacgtcgcaagccgcaccggtacaggcgcaaccgcgccagtctaaaccggcttcttctcagcagccgtaccaggatctgctgcaaactcctgcgcacacgactgcgcagtcgaagccgcagcaagctgcgccagttgctcgtgccgctgacgcgccaaaaccgacggcggagaaaaaagacgaacgccgctggatggtgcagtgcggttcgttcagaggcgcggaacaggcagagacggtacgtgctcagctggcgtttgaaggctttgactcgaagatcaccaccaacaatggctggaatcgtgtggtcattggcccggtgaaaggcaaagagaacgcagacagcaccctcaatcgcttgaagatggcgggtcatacaaactgcattcggctcgccgccgggggt

SEQ ID NO: 699 - DNA, 1008 bp, Escherichia coli
gtgacgcgccatggcaaatatcgctttgccgatagagctatgaccgccagaaacatgcttatgagtataaaagagcaaacgttaatgacgccttacctacagtttgaccgcaaccagtgggcagctctgcgtgattccgtacctatgacgttatcggaagatgagatcgcccgtctcaaaggtattaatgaagatctctcgttagaagaagttgccgagatctatttacctctgtcacgtttgctgaacttctatataagctcgaatctgcgccgtcaggcagttctggaacagtttcttggtaccaacgggcaacgcattccttacattatcagtattgctggtagtgtcgcggtggggaaaagtacaaccgcccgtgtattgcaggcgctattaagccgttggccggaacatcgtcgtgttgaactgatcacgactgatggcttccttcaccctaatcaggtactgaaagaacgtggtctgatgaagaagaaaggcttcccggaatcgtatgatatgcatcgcctggtgaagtttgtttccgatctcaaatccggcgtgccaaacgttacagcacctgtttactcgcatcttatttatgatgtgatcccggatggagataaaacggttgttcagcctgatattttaattcttgaagggttaaatgtcttacagagcggaatggattatccacacgatccacatcatgtatttgtttctgattttgtcgatttttcgatatatgttgatgcaccggaagacttacttcagacgtggtatatcaaccgtttcctgaaattccgcgaaggggcttttacagacccggattcctattttcataactacgcgaaattaactaaagaagaagcgattaatactgccatgacgttgtggaaagagatcaactggctgaacttaaagcaaaatattctacctactcgcgagcgcgccagtttaatcctgacgaaaagtgctaatcatgcggtagaagaggtcagactacgcaaa

SEQ ID NO: 700 - DNA, 2565 bp, Escherichia coli
atgcctcaggatatgatcaacgccaagccgatttccgcagcagtgaaagagttcttcggttccagccagctgtctcagtttatggaccagaacaacccgctgtctgagattacgcacaaacgtcgtatctccgcactcggcccaggcggtctgacccgtgaacgtgcaggcttcgaagttcgagacgtacacccgactcactacggtcgcgtatgtccaatcgaaacccctgaaggtccgaacatcggtctgatcaactctctgtccgtgtacgcacagactaacgaatacggcttccttgagactccgtatcgtaaagtgaccgacggtgttgtaactgacgaaattcactacctgtctgctatcgaagaaggcaactacgttatcgcccaggcgaactccaacctggatgaagaaggccacttcgtagaagacctggtaacttgccgtagcaaaggcgaatccagcttgttcagccgcgaccaggttgactacatggacgtatccacccagcaggtggtatccgtcggtgcgtccctgatcccgttccttgaacacgatgacgccaaccgtgcattgatgggtgcgaacatgcaacgtcaggccgttccgactctgcgcgctgataagccgctggttggtacgggtatggaacgtgctgttgccgttgactccggtgtaactgcggttgctaaacgtggtggtgtcgttcagtacgtggatgcttcccgtatcgttatcaaagttaacgaagacgagatgtatccgggtgaagcaggtatcgacatctacaacctgaccaaatacacccgttctaaccagaacacctgtatcaaccagatgccgtgtgtgtctctgggtgaaccggtagaacgaggcgacgtgctggcagacggtccgtccaccgacctcggtgaactggcgcttggtcagaacatgcgcgtagcgttcatgccgtggaatggttacaacttcgaagactccatcctcgtatccgagcgtgttgttcaggaagaccgtttcaccaccatccacattcaggaactggcgtgtgtgtcccgtgacaccaagctggggccggaagagatcaccgctgacattccgaacgtgggtgaagctgcgctctccaaactggatgaatccggtatcgtttacattggtgcggaagtgaccggtggcgacattctggttggtaaggtaacgccgaaaggtgaaactcaactgaccccagaagaaaaactgctgcgtgcgatcttcggtgagaaagcgtctgacgttaaagactcttctctgcgcgtaccaaacggtgtatccggtacggttatcgacgttcaggtctttactcgcgatggcgtagaaaaagacaaacgtgcgctggaaatcgaagaaatgcagctcaaacaggcgaagaaagacctgtctgaagaactgcagatcctcgaagcgggtctgttcagccgtatccgtgctgtgctggtagccggtggcgttgaagctgagaagctcgacaaactgccgcgcgatcgctggctggagctgggcctgaccgacgaagagaaacaaaatcagctggaacagctggctgagcagtatgacgaactgaaacacgagttcgagaagaaactcgaagcgaaacgccgcaaaatcacccagggcgacgatctggcaccgggcgtgctgaagattgttaaggtatatctggcggttaaacgccgtatccagcctggtgacaagatggcaggtcgtcacggtaacaagggtgtaatttctaagatcaacccgatcgaagatatgccttacgatgaaaacggtacgccggtagacatcgtactgaacccgctgggcgtaccgtctcgtatgaacatcggtcagatcctcgaaacccacctgggtatggctgcgaaaggtatcggcgacaagatcaacgccatgctgaaacagcagcaagaagtcgcgaaactgcgcgaattcatccagcgtgcgtacgatctgggcgctgacgttcgtcagaaagttgacctgagtaccttcagcgatgaagaagttatgcgtctggctgaaaacctgcgcaaaggtatgccaatcgcaacgccggtgttcgacggtgcgaaagaagcagaaattaaagagctgctgaaacttggcgacctgccgacttctggtcagatccgcctgtacgacggtcgcactggtgaacagttcgaacgtccggtaaccgttggttacatgtacatgctgaaactgaaccacctggtcgacgacaagatgcacgcgcgttccaccggttcttacagcctggttactcagcagccgctgggtggtaaggcacagttcggtggtcagcgtttcggggagatggaagtgtgggcgctggaagcatacggcgcagcatacaccctgcaggaaatgctcaccgttaagtctgatgacgtgaacggtcgtactaagatgtataaaaacatcgtggacggcaaccatcagatggagccgggcatgccagaatccttcaacgtattgttgaaagagattcgttcgctgggtatcaacatcgaactggaagacgag

SEQ ID NO: 701 - DNA, 1026 bp, Escherichia coli
gtggcgcagcctggctttgcgtcgcgccagtggttgcccggtatgcggaggaagcaatgcagatcctgtttaatgatcaaccgatgcagtgcgccgccgggcaaacggttcacgaactactggagcaactcgaccaacgacaagcgggcgcggctctggcgattaatcagcaaatcgtcccgcgtgagcagtgggcgcaacatatcgtgcaggatggcgaccagatcctgctttttcaggttattgcagggggttgagatgttacgtattgcggacaaaacgtttgattcacatctgtttaccggcacagggaaattcgcctcttcacaactgatgatggaggcgatccgcgcttgcggcagccaactggtgacactggcgatgaaacgcgtcaacttgctccagcacaacgacgctatcctcgaaccgcttatcgcggcgggtgtgaccctgctgccaaatacatccggggcgaaaacagcggaagaagccattttcgccgcccatctggctcgtgaagcgttaggcacaaactggttaaaattagagattcaccctgacgcccgctggctgttgcccgatcccatcgaaaccctgaaagccgccgaaacgctggtacaacagggatttgtcgtgctgccttactgcggagccgatccggtattgtgtaaacgtctggaagaagtcggctgtgcagcggtgatgccgctcggcgcgccgattggctcgaatcagggactggaaacccgcgccatgctggagattattatccagcaggccaccgttccggtggttgtcgatgctggcatcggcgttcccagccatgccgcgcaggcgctggaaatgggggccgatgcggtgttagtgaatacggcgattgccgtcgcggacgatcccgtcaacatggcgaaggcatttcgcctggcggtagaagcaggcctgctggcacgtcaggccggaccgggcagccgcagtcattttgctcatgccaccagcccgctgaccggatttctggaggcatcggca

SEQ ID NO: 702 - DNA, 2094 bp, Escherichia coli
atgaaaaaaagacatctgcttagcttactggcgctgggcattagcacagcttgctacggcgaaacatatcctgcgcccattggtccgtcgcagtcggatttcggtggcgtaggattattacaaacgcctaccgcccgcatggcgcgggaaggggagttgagtttgaactatcgcgataacgatcagtaccgttattactcagcttcagtgcaactcttcccgtggctggaaacaacgctgcgctataccgatgtgcgcacccggcagtacagcagcgtcgaagcgttctctggtgatcaaacgtataaagataaagccttcgatctcaaactgcgtttgtgggaagagagttactggctgccgcaagtggcggttggtgcgcgggatatcggcggtacggggctgtttgatgcggaatatcttgttgccagcaaagcctgggggccgttcgattttacgctcggcctgggctggggatatctgggcaccagcggtaatgtgaaaaatccgctctgttcagccagtgataaattttgctatcgcgataacagctacaaacaggcgggatctatcgacggtagccagatgttccacggcccgacctcactgtttggcggcgtggaataccagacgccctggcaaccgctgcgcctgaaactggagtatgaaggtaataattatcagcaggattttgccgggaagctggagcaaaaaagtaagtttaacgtcggggcgatttatcgcgttaccgattgggccgacgttaaccttagctatgaacgtggcaacacctttatgtttggcgtcacgctgcgcaccaactttaacgatctgcgcccgtcctacaacgataacgcccgcccgcaatatcaaccgcagccacaggatgccattttgcagcattctgtggtggcgaatcagttaacgctgttgaaatacaacgccggactggccgatccgcagatccaggcgaaaggcgatacgctgtatgttaccggcgagcaggtgaaatatcgtgattcgcgcgaagggatcatccgtgctaatcggatcgtgatgaacgatctgccggatgggatcaaaacgatccgcattacggaaaatcgccttaacatgccgcaggtgacgacggaaaccgatgtcgccagcctgaaaaatcatctcggcggagagccgttgggccacgaaacgacgctggcgcaaacacgcgtcgagccagtggttccgaagtccaccgagcagggctggtatatcgacaaatcacgctttgatttccatatcgatccggtgctgaaccagtcggtcggtggcccggaaaacttttatatgtatcagctgggcgtgatgggaacggcagatttgtggctgacggaccatctgctcaccaccggcagcctgttcgctaaccttgccaacaactacgacaagtttaactacactaatccaccgcaggactcgcacttaccgcgcgttcgtacccatgtgcgcgagtatgtgcagaacgatgtctatgtgaataacctgcaagccaactacttccagcatctgggcaacggcttctacggccaggtctacggaggttatctcgaaaccatgtttggcggtgcgggggccgaagtgttgtatcgtccgctggacagcaactgggcgtttggtctggatgccaactacgttaaacagcgcgactggcgtagtgcaaaagatatgatgaaattcaccgactacagcgtgaaaaccggacatctgaccgcgtactggacgccatctttcgctcaggatgtgttagtgaaagcgagcgtcgggcagtatctggcgggcgataaaggcggcacgctggagatcgctaaacgctttgacagcggcgtggtggttggcggctatgccacgatcaccaacgtttcgaaagaggagtacggcgaaggggacttcaccaaaggcgtgtatgtctctgtaccgttggatctcttctcgtctggcccgacacgcagccgtgcggcaattggctggacgccgctgacgcgtgacggtggtcagcaacttgggcgtaagttccagttgtatgacatgaccagcgaccgtagcgtcaatttccgc

SEQ ID NO: 703 - DNA, 606 bp, Escherichia coli
atgaaagcgttaacggccaggcaacaagaggtgtttgatctcatccgtgatcacatcagccagacaggtatgccgccgacgcgtgcggaaatcgcgcagcgtttggggttccgttccccaaacgcggctgaagaacatctgaaggcgctggcacgcaaaggcgttattgaaattgtttccggcgcatcacgcgggattcgtctgttgcaggaagaggaggaagggttgccgctggtaggtcgtgtggctgccggtgaaccgcttctggcgcaacagcatattgaaggtcattatcaggtcgatccttccttattcaagccgaatgctgatttcctgctgcgcgtcagcgggatgtcgatgaaagatatcggcattatggatggcgacttgctggcagtgcataaaactcaggatgtacgtaacggtcaggtcgttgtcgcacgtattgatgacgaagttaccgttaagcgcctgaaaaaacagggcaataaagtcgaactgttgccagaaaatagcgagtttaaaccaattgtcgttgaccttcgtcagcagagcttcaccattgaagggctggcggttggagttattcgcaacggcgactggctg

SEQ ID NO: 704 - DNA, 1677 bp, Escherichia coli
atgagcaatgctattaacgaaattgataataccgatttagtgttcgttttcgggtacaacccggcggattcccacccaatcgtggcgaatcacgtaattaacgctaaacgtaacggggcgaaaattatcgtctgcgatccgcgcaaaattgaaaccgcgcgcattgcggacatccacattgcactgaaaaacggctcgaacatcgcgctgttgaatgcgatgggccatgtcattattgaagaaaatctgtacgacaaagcattcgtcgcttcccgtacagaaggctttgaagagtatcgtaaaatcgttgaaggctacacgccggagtcggttgaagatatcaccggcgtcagcgccagtgagattcgtcaggcggcacggatgtatgcccaggcgaaaagcgccgccatcctgtggggcatgggtgtaacccagttctaccagggcgtggaaaccgtgcgttctctgaccagcctcgcgatgctgaccggtaacctcggtaagccgcatgcgggtgtaaacccggttcgtggtcagaacaacgtgcagggtgcctgcgatatgggcgcgctgccggatacgtatccgggataccagtacgtgaaagatccggctaaccgcgagaaattcgccaaagcctggggcgtggaaagcctgccagcgcataccggctatcgcatcagcgagctgccgcaccgcgcagcgcatggcgaagtgcgtgccgcgtacattatgggcgaagatccgctgcaaactgacgcggagctgtcggcagtacgtaaagcctttgaagatctggaactggttatcgttcaggacatctttatgaccaaaaccgcgtcggcggcggatgttattttaccgtcaacgtcgtggggcgagcatgaaggcgtgtttactgcggctgaccgtggcttccagcgtttcttcaaagcagttgaaccgaaatgggatctgaaaacggactggcaaatcatcagtgaaattgccactcgtatgggttatccgatgcactacaacaacacccaggagatctgggatgagttgcgtcatctgtgcccggatttctacggtgcgacttacgagaaaatgggcgaactgggcttcattcagtggccttgccgcgatacttcagatgccgatcaggggacttcttatctgtttaaagagaagtttgataccccgaacggtctggcgcagttcttcacctgcgactgggtagcgccaatcgacaaactcaccgacgagtatccgatggtactgtcaacggtgcgtgaagttggtcactactcttgccgttcgatgaccggtaactgtgcggcactggcggcgctggctgatgaacctggctacgcacaaatcaataccgaagacgccaaacgtctgggtattgaagatgaggcattggtttgggtgcactcgcgtaaaggcaaaattatcacccgtgcgcaggtcagcgatcgtccgaacaaaggggcgatttatatgacctaccagtggtggattggtgcctgtaacgagctggttaccgaaaacttaagcccgattacgaaaacgccggaatacaaatactgcgccgtgcgcgtcgagtcgatcgccgatcagcgcgccgccgagcagtacgtgattgacgagtacaacaagttgaaaactcgcctgcgcgaagcggcactggcg

SEQ ID NO: 705 - DNA, 678 bp, Escherichia coli
atgattaacgtacaaaacgtcagtaaaaccttcatcctgcaccagcaaaacggcgtgcgcctgcccgtcttacaacgtgcctcgctcaccgtcaacgcaggcgaatgcgtggtgcttcacggccactccggcagcggaaaatcaaccctgctgcgctcgctgtacgccaactatctgcccgacgaagggcaaatccagatcaaacacggtgaggaatgggtagacctggtcaccgcgccagcccgcaaagtggtggagatccgcaaaaccaccatcggctgggtgagccagtttctgcgcgtcatcccgcgtatttcggcactggaagtggtgatgcagcctctgctcgataccggcgtaccgcgtgaagcctgcgccgctaaagccgcccgattactgacgcgcctgaacgtgcctgaacgcctgtggcaccttgcaccatcgaccttctccggcggcgaacagcagcgcgtcaacatcgcccgtggctttatcgtcgactaccccattctgctgctcgacgaacctaccgcctcgctggacgccaaaaacagcgccgcggtggtggaactgattctcgaagctaaagcccgtggcgcagccatcgtcggtatcttccatgacgaagccgtacgcaatgacgtcgccgaccgcctgcacccgatgggagcctcttca

SEQ ID NO: 706 - DNA, 1014 bp, Escherichia coli
atgaatgctaagataattgcctcgctggccttcaccagcatgttcagcctcagcaccctgttaagcccggcgcacgccgaagagcaggaaaaggcgctgaatttcggcattatttcaacggaatcacagcaaaacctgaaaccgcaatggactccgttcttacaggatatggagaagaagctgggcgtaaaggtcaacgccttctttgccccggactacgcgggcattatccaggggatgcgcttcaataaagtggatatcgcctggtacggcaatctgtcggcgatggaagcggtggatcgcgccaacggtcaggtcttcgcccagacggtcgcggcggatggatcgccgggttactggagcgtgttgatcgtcaacaaagacagtccgatcaacaacctgaatgatctgctggcgaagcgtaaagatctcaccttcggcaatggcgatcctaactccacctctggcttcctcgtccccggctactacgtcttcgccaaaaacaatatctccgccagcgacttcaagcgcaccgtcaacgccgggcatgaaaccaacgcgctggccgtcgccaacaaacaggtggatgtggcgaccaacaacaccgaaaacctcgacaagctgaaaacctccgcaccggagaagctcaaagaactgaaggtgatctggaaatcgccgctgatcccaggcgatccgatcgtctggcgcaaaaatctgtccgaaaccaccaaagacaagatctacgacttctttatgaactacggcaaaacgccggaagagaaagcggtgctggagcgcctgggatgggccccgttccgcgcctccagcgacctgcaactggtgccgattcgccaactcgcactgtttaaagagatgcagggcgtaaaaggtaataaagggctgaatgagcaggacaagctggcaaaaaccagcgccattcaggcgcaactggatgacctggaccgcctgaacaacgcgttaagcgcgatgagttcggtgagtaaagcggtgcag

SEQ ID NO: 707 - DNA, 948 bp, Escherichia coli
atgagtgatatcagtaaggcgagcctgcctaaggcgatttttttgatggggccgacggcctccggtaaaacggcgttagccattgagctgcgtaaaattttaccagtagagttgataagcgttgattctgcccttatttacaaagggatggatatcgggacggcgaagccgaacgctgaagagttactcgccgcgccgcaccgattgctggatattcgcgatccgtcgcaggcttactcggctgctgattttcgccgcgatgcgctggcggaaatggccgatatcaccgcggcggggcggatcccactgttagtgggcggtacgatgttgtatttcaaggcattgctggaagggttgtcgccgctaccgtcggcagacccggaagtgcgggccagaattgagcaacaggcggcagagcaaggttgggagtcattgcatcgtcaacttcaggagatcgatccggttgcggcagcaaggattcatccaaatgatccacaaaggctttcccgggcactggaagtttttttcatttcgggtaaaactttaacggaactgacgcaaacgtcaggagacgctctaccgtatcaggtgcatcagttcgccatcgccccggcgagccgtgaactgctccatcaacgaattgagcagcgttttcatcagatgttggcttcaggttttgaagcagaagtccgggcgctttttgcccgaggagatttgcatacggatttgccttccattcgttgcgtgggttatcgccagatgtggtcttaccttgaaggcgaaatctcatacgatgaaatggtttatcgaggtgtttgcgccacgagacagttggcgaagcggcagataacctggctgcgtggttgggaaggggttcactggcttgacagtgaaaaaccagaacaagcgcgtgacgaagtattacaggttgttggtgctatcgcaggc

SEQ ID NO: 708 - DNA, 1950 bp, Escherichia coli
atgtccctgatgattaagtttagcgcaacgctcctggccacgctgattgccgccagtgtgaatgcagcgacggtcgatctgcgtatcatggaaaccactgatctgcatagcaacatgatggatttcgattattacaaagacaccgccacggaaaaattcggactggtacgtacggcaagcctgattaacgatgcccgcaatgaagtgaaaaacagcgtactggtcgataacggcgatttgattcaggggagtccgctggcagattacatgtcggcgaaaggattaaaaacaggtgatgttcatccggtttataaggcgctgaatacgctggattatacggtcggtacactcggcaatcatgaatttaactacggtctggattacctgaaaaatgcgctggcgggagcgaaattcccttatgtaaatgccaacgtcattgacgccagaaccaaacagccaatgtttacaccgtatttaattaaagataccgaagtggtcgataaagacggaaaaaaacagacgctgaagattggctatattggcgtcgtgccgccgcaaatcatgggctgggataaagctaatttatccgggaaagtgacggtgaatgatattaccgaaaccgtgcgcaaatacgtgcctgaaatgcgcgagaaaggtgccgatgtcgttgtcgttctggcacattccgggctgtctgccgatccgtataaagtgatggcggaaaactcagtttattacctcagtgaaattccgggcgttaacgccattatgtttggtcatgctcacgccgttttcccgggtaaagattttgctgatatcgaaggggctgatatcaccaaaggcacgctgaatggtgttccggcggtaatgccgggcatgtggggcgatcatcttggggtggtcgacttacaactcagtaatgacagcggtaaatggcaggtgacgcaggcgaaagcggaagctcggccgatttacgacatcgccaataaaaaatccctcgcggcggaagacagcaagctggtagaaacactcaaagccgatcacgatgccacacgccagttcgtcagcaagccaatcggtaaatctgccgacaatatgtatagctatctggcgctggtgcaggacgatccgaccgtgcaagtagtgaacaacgcgcaaaaagcgtatgtcgaacattacattcagggcgatccggatctggcaaaactgccggtgctttcagctgccgcaccgtttaaagttggtggtcgcaaaaatgacccggcaagctatgtggaggtggaaaaaggccagttgaccttccgtaatgccgccgatctttatctctaccccaatacgctgattgtggtgaaagccagcggtaaagaggtgaaagagtggctggagtgctccgccggacagtttaaccagattgatcctaacagcacgaaaccgcaatcactcatcaactgggatggtttccgcacctataactttgatgtgattgatggtgtgaattatcagattgatgttacccagcctgcccgttatgacggcgagtgccagatgattaataccaatgcggaaaggattaagaacctgacctttaatggcaagccgattgatccgaacgccatgttcctcgttgccaccaataactatcgcgcttacggcggcaaatttgccggtacgggcgacagccatatcgcttttgcttcaccggatgagaaccgctcggtgctggcagcgtggattgctgatgagtcgaaacgtgcgggggaaattcacccggcggcagataacaactggcgtttagcaccgatagctgccgataagaaactggatatccgtttcgaaacttccccgtcagataaagccgcagcgtttattaaagagaaagggcagtatccgatgaataaagtcgcgaccgatgatatcgggtttgcgatttatcaggtggatttgagtaag

SEQ ID NO: 709 - DNA, 3231 bp, Escherichia coli
atggcagagcaaacctcgcgtctcgcaataattattgatagcactggagcgaaaaataatgctgacaatctggcctcctcattagtcaaaatgacgcaggctggggaaactgctgcaaatagcgcagggaaagtgactaaggcaacagaagatgagaagaacgcgctcgcaaaattaaaagcagctattgatccagttggtgccgcaattgatactgtcggtcgacgctattctgaattaaagaaatttttcgataaagggcttattgataaagaagaatatgaatttcttgtccgtaaacttaatgaaaccacagaggaattgagcggggttgcgcaagcgcagagagaagccgagaaggccggaaaacttgctgccgcccagcaggaagcgcaggctcaggtctttcaaagaatgctggacaagatcgaccctctggctgcggcgctaagaaatcttgaacaacagcaggatgaacttaatgctgcgtttgcatccgggaaaataaatggttctcagtttgagaattatagccgaaaaatacaggaaacacggcgagagcttaccggagaggctcaggcagagcgagaagcagcaaaagcacatgatgaacaggttgctgctttgcaacgtctgattgctcaacttgatcctgtcggaactgcttttaatcgtctggtagaacaacagaaacagctcaatgaagcaaaagctaaggggatgctttctcctgaaatgtatgaggagctttctggaaaacttcgtgctatgcggagtgagcttgaggttactcaatcgcaattaagcaaaaccggaatgtcggcaaaacaaacggcttttgctatgcgcatgttgcctgcacaaatgacggatattgttgttgggttgtccactggtcagtcgccatttatggtgttaatgcagcagggcggccagctaaaagatatgttcggtgggattggcccggcgatcaaaggtgtaggttcttatgtgctgggattaattaatccttttaccctggccgcagcagccgttggcgtcttagggctggcttactataaaggctctcaggagcaggacgaatttaataaatctcttattcttaccggaaatcagttggggacaaccagcgggcaattggccgatatagctcaacgtgccgggaatgcggctgattcgacaactggcgcagcggcggcagtattaaaccagcttgtgcgttcgggaaaggtagcgagcagttcgctggagcaagtgacgacagcgatagtaaaaacgagcgaagtaacaggaatatcaaccgaacaactggttaatgacttcaatgaaattgcaaaggatcctgtcagtgctatatcaaaacttaatgatcagtaccattttctgacacttgcgacttataaccagattaaggcgctacaggatgaagggaaccagcaggaggccgcccgcattgcgacagaagcatactcatcctcaatgatccagcgcaccaaccagattaaagaaaatcttggttatcttgagactgcatggaaagctgtcgcagactccgcaaaatgggcatgggattccatgctggatattggccgtgaggcctcccttgatcaaaaaatctcagatgttctccgtcaaattgatgaaatagaaaaaaatacccgacccggagttttcgggttaggtggcattggagatggcggagctcaaaataaaaagctggcacgattaaagcagcaattgggcgtacttcaagcagaaaaaattgctcaggacgtactaaattcatcaataaacgattacaacaagcgacaacaggaaggaattgaactcagacagagagcagatgctttttcaaaacaatatcagacccgggagcagcagagagctagtgaacttgcaaaactggaaaagctaaagaatcagtattcaaaggaagaatataataatcttatcgctcaaataaatgagcgttataaagatccaaagcaaccaaaggcgaaaggttattcggatgatgctgcccaacgaatgattgatcatctgaatcaacagaatgcgttactaagttcacaagctgaattgaccgttaaattaagttcctctgaacaggaactggttaagtggcgtcagcagattgccgacctggagtcacgaccgtcatcgaaattaacccaggatcagaaatcgcttctcttacaccgggaagaaataaccgcgttgatggagaaaaatgttgcgattgaaaaaaataacaggctaatcaaagaatccgccgaaatagccgcatggcgtgattcattgcaggcttcgattgataatcgtcagcaggggtatgatattcagattgctggttatggggttggcgataaaaatcagcaacgccagcaggaattactgcggattgaacgtgaatataacaatcagcgtctgcaacttgaacgtgactatgcagataaatcccgtggaatgtcaaatcatgtttttcaggagaaaatgcaggctctgaatgatgctctggagcgagaaaaagaaattgtcagccagaaaaacgagcagctcgatattcaggcaggagactggattagtggtgcctcccagggattcaataactggctggatgacactaaggatatcggtgcgcaaataaaatcaaccacgactcagatgtttgatgggatgaccgatgcgctaggtgattttgtcacgacaggcaaggcaaattttcgttctttcgctacttccgtgatttcagatcttagtcgaattgcattaaaggcttcaattactgggattttcgacagcattagtaacagttcttctgggggtattttaggaactatcgggagtgctattagtaaatttattccgaatgcaaagggcggtgtttatgagtctccgtcattgagtacatattcgaacggtatttatgactccccgcaattttttgcttttgcaaaaggagctggtgtttttggtgaggctggaccggaagctattatgccattaacgcgaacttccgatggttctcttggtgtcagagctattaatagtaaaagtggtaatggaggcagagatattacttatgcccctgtataccaaatcactattcaaaatgacggccagaatggagagattggtcctcaggcaataaaagcacttatggggatggttgatcagcgggtgcagggcgctctgttaaatatgcgacgtgatggaggaatgttaagtggc

SEQ ID NO: 710 - DNA, 804 bp, Escherichia coli; identical to SEQ ID NO: 690

SEQ ID NO: 711 - DNA, 1248 bp, Escherichia coli; identical to SEQ ID NO: 695

SEQ ID NO: 712 - DNA, 348 bp, Escherichia coli
tcccgtttactcctccggtcttttaaaattctccccttcattcagccggtttatgtccttcatgtcttcgttctttcacggcagatttctgcatccaggcgtgttttcgttatgcgttttgctccctttactcgccagcgccaccacatcacatatctctttcagctacgccgcccgccagcggatgcaaaaccgtgcgcgtttattaaaacagtaccaaacccatctgaaaaaacaggccagctatattgtggaaggcaatgccgaaagcagaaaggcgctgcgccagcacaaccgcgaacagataaaacagcatccagaatggtttcctgcgccgctcaaggcgag

SEQ ID NO: 713 - DNA, 261 bp, Escherichia coli
ctacgggcaactggaagccgagtaccgcatcggacgcaatatgctgctggaaggcgacctgctctcggtttacagccgtgtatttgccgataccggagaaaacggggtgatgatgccggtgaaaaatccgatgtccggcaccggtctgcgctggaagccgctgcgcgatcagatctttttcctcgccgtcgaacagcagttgccgctgaacgggcaaaatggcgcatccgataccatgctgcgcgccagcgcctcattctt

SEQ ID NO: 714 - DNA, 174 bp, Escherichia coli
accgaccggcgcactggacagccattctggcgaagaggtgatggcgatcctgcatcagctgcgcgatcgcgggcatacggtgattatcgttacccacgatccgcaggttgctgctcaggccgagcgggtgatcgaaattcgcgacggcgaaattgtgcgcaatcctcccgccgt

SEQ ID NO: 715 - DNA, 114 bp, Escherichia coli
ttacgtgcaggcgggaatgccgaaaaagaaaaaacggacgctttcgccagattatccacgcgacccggcgcaggtttatctgtggctggaagaagctggttggcaaattatggg

SEQ ID NO: 716 - DNA, 162 bp, Escherichia coli
atgccggcggtaaagcgtctgatgtcacccagaacacgggaggtgcactggttaccagcacagctgcaaccgtcaccggcacaaaccgcctgggagcattctccgttctggcgggtaaggctgataatgtcgtactggaaaatggcggacgtctggatgtgc

SEQ ID NO: 717 - DNA, 351 bp, Escherichia coli
ttgacggcattaaagatctcgccgttcagtatcgtgatatcccgctgctgtctcgtacccacggtcagccagccacgccgtcaaccatcggtaaagagatggcaaacgtcgcctaccgtatggagcgccagtaccgccagcttaatcaggtggaaattctcggcaaaatcaacggcgcggtcggtaactataacgcccacatcgccgcttacccggaagttgactggcatcagttcagcgaagagttcgtcacctcgctgggtattcagtggaacccgtacactacccagatcgaaccgcacgactacatcgccgagctgtttgattgcgttgcgcgcttcaacaccattc

SEQ ID NO: 718 - DNA, 669 bp, Escherichia coli
acaaacggtaaccgagtaaatgacagatcttcccgacagcacccgctggcaattgtggattgtggctttcggcttctttatgcagtcgctggacaccaccatcgtcaacaccgcgcttccctcaatggcgcaaagcctcggggaaagtccgctacatatgcacatggtcattgtctcttatgtgctgaccgtggcggtgatgctgcccgccagcggctggctggcggacaaagtcggcgtgcgcaatattttctttaccgccatcgtgctgtttactctcggttcactgttttgcgcgctttccggcacgctgaacgaactgttactggcacgcgcgttacagggcgttggcggtgcgatgatggtgccggtcggaaggcttacggtgatgaaaatcgtaccgcgcgagcaatatatggcggcgatgacctttgtcacgttacccggtcaggtcggtccgctgctgggtccggcgctcggcggtctgctggtggagtacgcatcgtggcactggatctttttgatcaacattccggtgggaattatcggcgcgatcgccacactgatgttaatgccgaactacaccatgcagacgcggcgcttcgatctttccggctttttattgctggcggttggcatggcggtattaaccctggcgctggacggcag

SEQ ID NO: 719 - DNA, 117 bp, Escherichia coli
acaggcccgacgggtgctggataccactatgcaaatgtacgaacagtggcgggaacagcaaccgaagctggcgcatccgcaactggaggcgctactgcgatgggccgccatgctgca

SEQ ID NO: 720 - DNA, 1143 bp, Escherichia coli
gtgcggggcgtgatgctttaccatacttgcccctggttgaatctgttaaatggacccctcatgttcaagcgtcgttatgtaacattgcttcccctttttgtgttgcttgccgcctgtagcagcaagccaaaacctactgagactgaaacgaccaccggaacgccgtctggcggcttcctgcttgagccgcagcacaatgtgatgcagatgggcggcgatttcgctaataacccgaatgcccagcagttcatcgacaaaatggtgaacaaacacggtttcgatcgtcagcagttgcaggaaattctctcccaggcgaaacgtctggattcggtactgcggctgatggataaccaggcaccaaccacatcggtgaaaccgccatcaggtccgaacggcgcatggctgcgttatcgcaaaaaatttattacgccggacaacgtgcagaacggtgtggttttctggaatcagtatgaagatgcgttgaatcgcgcgtggcaggtgtatggtgtaccgccggaaattatcgtcgggattatcggcgttgaaacccgctgggggcgcgtgatggggaaaacccgtatcctcgatgcgctggcaacgctgtcatttaactacccacgccgcgcggagtatttctctggcgagctggaaactttcctgctgatggcgcgcgatgagcaggacgatccgctcaatctgaaaggttcctttgccggggcgatgggctacggacagtttatgccgtcgtcttacaaacaatatgcggtagatttcagcggcgacgggcatatcaacctgtgggatccggttgatgcgatcggtagcgtggcgaactatttcaaagcgcacggctgggtgaaaggtgatcaggttgcggtgatggcaaacggtcaggctccaggcttgccaaatggcttcaaaaccaggtacagcatttcgcagcttgccgcggcaggtttaacgccacagcagccgctgggcaaccatcaacaagccagcctgctgcgtctggatgtcggtaccggttaccagtactggtacggtctgccgaacttctacaccatcacccgttacaaccacagtacccattacgcaatggcggtctggcagttaggacaagccgtggcgctggcgcgcgtgcag

SEQ ID NO: 721 - DNA, 144 bp, Escherichia coli
aaaaggttacaccacggggcattctccgcagtcaaagccgctggcgcagatgggcggcctggtggcgacccgcagtatcgggcagttttccacactctacggcgcaatcgaagatatggtcgttggtctggaagcagtattggc

SEQ ID NO: 722 - DNA, 1296 bp, Escherichia coli
atgcgcactatactccgctcgcgttttcatgcaaccttttttttaccccgatcacggttctggcatgattttgaacaaaaacaaatcactaaagcctattttttgtgcaaaatttgcgtcacggagaggctgctcatttcattaaacgcggcggtttgttatcttcgttgcgccttattttttaacctgaagaagagaacaatgaaaggacgttgggtaaagtaccttcttatgggcacggttgtggcaatgcttgccgcctgctcttccaaaccaaccgatcgcggacagcaatataaagacgggaaatttacccagcctttctctctggtgaaccagccagatgccgttggcgcgccgattaacgccggtgattttgccgagcaaattaaccatatccgtaattcgtcaccgcgtctgtatggcaaccagagtaatgtttataacgcggtgcaagagtggctgcgcgcaggcggtgatacccgcaatatgcgccagttcggcattgatgcctggcagatggaaggtgccgacaactatggtaacgtgcagtttacaggctattacacgccggtaattcaggcacgccatacccgccagggcgagttccagtatccgatttaccgtatgccaccaaaacgtggtcgtttgccgtctcgtgcggagatctacgcgggagcattgagcgataaatacattctcgcttacagtaactccttgatggataacttcattatggatgtgcagggtagtgggtatatcgactttggtgatggcagtccgcttaactttttcagctatgcagggaaaaacggtcatgcctatcgcagcattggtaaggtgctgatcgaccgtggcgaagtgaaaaaagaagatatgtcgatgcaggcgattcgtcactggggcgaaacacacagtgaagccgaggttcgcgagctgctggaacagaacccgtctttcgttttctttaaaccgcaatcttttgcaccggtgaaaggagcaagtgcagtaccgctggttggccgtgcttctgttgcctccgatcgttcaattattccgccaggtactaccttactggcagaagtgccgctgctggataataacggcaaatttaacggtcagtatgaactgcgtctgatggtggcgctggatgtcggtggcgcaatcaaaggccaacacttcgatatctatcaagggatcggtccggaagccgggcaccgcgcaggttggtacaaccactatggacgtgtctgggtgctgaaaacggctccgggcgcaggtaacgtctttagcggc

SEQ ID NO: 723 - DNA, 309 bp, Escherichia coli
atctgcatgcagccgaggtggaaggcgacagttttcaccgttacacacgcccggaaatggacatggcgatccgcaaagcgcgcgacgccgggcggcatatcagctacttcggccccgaagcgaacgactttggcctgctggaacaaaccttcattgaatatggtcagagcggcaaagggaaatctcgcaaatatctgcatacctacgatgaagccgtaccgtggaatcaggtaccggggacatttaccccctggcaacctttaccggaacccactgatgtactgttttatgaaggtttacacggcggcg

SEQ ID NO: 724 - DNA, 249 bp, Escherichia coli
aatatcgccacgccctcacctttgagcaacgcatccgcgtgcgtgcacatatcgaagagttcgaaaaccgtctgcggattggctatcagattttcgatgccgaaacgggcaaacgcgccaccaccggatacaccattcaggtcgcggtcgacgagcaaagccgcgaactgtgctttgtcagccccgatattttgtttgaacgcatgggagtcaaaccatgaaatttttaccactgctggcgctgctgat

SEQ ID NO: 725 - DNA, 150 bp, Escherichia coli
ccgctgtcgttacaccttgctccgacagctgcgaacccctggacagcgtattcgcagcctggcggtcgtcgtgctagcgggtattatggtttgggcaccgattcgtttgctggatatccagcagaagaaagtggagagggcgaccggtgt

SEQ ID NO: 726 - DNA, 165 bp, Escherichia coli
ataaaccgatgcgcgtgcgtgcgctgcatgcacaaaaccagccaacagaaaccgcccatgccgggcagcgtatcgcgcttaacatcgcgggtgatgcggaaaaagagcagattaaccgtggcgactggctgcttgccgatgtgccgccagagccgttcacgcggg

SEQ ID NO: 727 - DNA, 183 bp, Escherichia coli
gaacgccgatctgtttggctggtttggtattggtcgtccgctgggcgtaccgacgccagtctggatcatggggattgtgttcctcgcggcctggtacatgctgcatcacacgcgtctggggcgttacatctacgcgctgggcggcaacgaagcggcaacgcgcctttctggtatcaacgtcaa

SEQ ID NO: 728 - DNA, 96 bp, Escherichia coli
caaagcggaaaagacctatattatgcgcgccgccgagcagacaatcttatgtggcgtggtgtcgatgggaaatccgcactgcgtgattcaggtcga

SEQ ID NO: 729 - DNA, 159 bp, Escherichia coli; identical to SEQ ID NO: 222

SEQ ID NO: 730 - DNA, 123 bp, Escherichia coli
gtggctgattgccgtggatttacagtgcggcagcccgtggaatgcggcagcgatgcttgcgatgcgcaatcctcgtctgcgggtaatcagcggcctttctctgccgctggcgctcgaactggt

SEQ ID NO: 731 - DNA, 168 bp, Escherichia coli
caccggcgttggggcagcaaaaactttatgttctggtctttaccacggaaaaagatctccagcagacgacccaactgctcgacccggctaaagcctatgccaaaggcgtcggtaactcgatcccggatattcctgacccggttgctcgtcataccaccgatggcttac

SEQ ID NO: 732 - DNA, 279 bp, Escherichia coli
agtgacctccggcagctccgtgatggtggtgtgggaaggaacgcgtccgttgctggtggagattcaggcgctggtcgatcactcgatgatggcgaatccgcgccgcgtggcggtaggtctggagcaaaaccgtctggcaatcctgctggctgtcttgcaccgtcacggtggtctgcaaatggccgatcaggatgtatttgtgaacgtggtcggtggtgtgaaggtaaccgaaaccagtgccgacttagcgttactgctggcgatggtttccagcctgcg

SEQ ID NO: 733 - DNA, 213 bp, Escherichia coli
gcgaagaggattacgcctggctggcgcaatatgacattgtgcacgcggcaatctggggacatgcggaggacgcattcccgcacctgcacgcagcgggcaaacttaccgctttcgacttctccgacaagtgggacagcccgctctggcagacactggtgccgcatctcgattttgcctttgcctccgcgccgcaagaagacgaagctctacgtc

SEQ ID NO: 734 - DNA, 225 bp, Escherichia coli
cgcccacgttcaggtcacctttctggtggagaaactctcccccgcatggcagcgacgagtcgctctggttacccattccttaatcttatttatttgtggcgcactggcctggggcgcaacgctaaaaacaattcaggactggagcgattattcaccgatcctcggtttgcccatcggcctgatgtatgccgcttgtctgcccaccagcctcgttatcgcattctt

SEQ ID NO: 735 - DNA, 300 bp, Escherichia coli
gatgctccagcagtttccaggcgcgtttaccctgacgtcgggacatacgcaactgcaactgccagatatcgcgggttaacgtcgtcagacgtttcgggattgccagtgaacggcaggcttcgtccagcacgtcgttcatcgccagcgcgaaagcgtcgtgataggtcaggccgctttcctgggcgatcttctgtgccgtctccagcagagggtaccagaacatggcggcaaacaggaacgccgggttcacgcgcatatcgttatggatacgcgtatcggtattcttcagcacctgttcaa

SEQ ID NO: 736 - DNA, 195 bp, Escherichia coli; identical to SEQ ID NO: 240

SEQ ID NO: 737 - DNA, 282 bp, Escherichia coli
cggcttttttctcgctgtgacgcgccagtcggttgttcagcgcctgctggatcaagtagccaatgccgccttgcgtatctgccacacagttcgccagcggcattaagggcagcccttcacgctcgtgggcaatctccgcacggcgtaaatccagcccgacctgcggcccgttgccgtgggtcagcacaatgtcgtaatcggaagccagcatttccagcaccgtatcggccacggctttcaccgcctccgcctgatgctcaatcgactggctggcgttatctt

SEQ ID NO: 738 - DNA, 150 bp, Escherichia coli
gactcaccggttctgttgcagaaactgcagctgacgcagggtacggacatcctctctggcctgttcgatacagggcaacagtgctgccgaatccgttctatcctcatcgttgtcaaagataattcccgattcgcagtcgatattgtcctg

SEQ ID NO: 739 - DNA, 252 bp, Escherichia coli
gtcggggcgaaaatccccgagaacagcatcacgcaatgttgccagcatatgttggtcaataccacgtccgccgccctgatacgcctgagtggagagatcgtggcgatcgccaatcacccaggtgccgttagccagcgcaggtttgatgaccgtttctaccagttgaacgcgcgcggcataaaacatcagaacttcggctttatcggtaatgacttcatcgcctaccgatttgatatccagcaccaggcttct

SEQ ID NO: 740 - DNA, 180 bp, Escherichia coli
ttggcatgccgacgctggagtaggcatccatcatctgttctgaggttatcacttcaatctggtgcgggtaggtatccagccgatagagtttcgccacccggtctatctctgccagataaacatccagcaggtcgaacgtccagtcgggtccatcgctcaaacgtgtggtgtccttattca

SEQ ID NO: 741 - DNA, 123 bp, Escherichia coli
catcgccagtttctgcgcctgttcgacaacatgcttcattttcgggctgacggcgacaatttgactaaaggcgctgacgtcctgggcggcgacattttgcaactgacggcccatacgaatcgt

SEQ ID NO: 742 - DNA, 285 bp, Escherichia coli
ctggcgcataatcatgaacccatgtggcaaccagcactgcgccaacgctttgcgcgatcacaaccacctcttccagtccgacctggctatcgctggcagcaaaacgaacaaattcatcgacatcctgcactgaacgcgcaagagatgggctataaccacgcggccccgaagtttgtccatgccctcgggcatcccaggcataaaaagcagtgtctggcatcgccatttcatcaacgagatgttgtagacgcccggaatgttcatgaccgcgatgaaataagacga

SEQ ID NO: 743 - DNA, 390 bp, Escherichia coli
tgccgaagtggttccacgcccgcactgtcgccatacgcccgcgcggtgtacgctgcaaaaagccttgctgaatcaaataaggttccagcacatcctcaatggtttcacgttcttcgccaatggcagccgccaggttatccaggcctaccggcccaccaaagaacttatcgattaccgccagcaacaatttgcggtccatataatcgaaaccttcggcatcgacattcagcatatccagcgcctgagcagcgatatcagccgagatggtgccatcgtgcttcacttcggcgaaatcacgcactcgacgcagcagacggttggcaatacgtggcgtaccgcgagcgcgacgagcaacttccagcgcgccgtcatcactcatctcaagcccca

SEQ ID NO: 744 - DNA, 198 bp, Escherichia coli
tgcagcggcgcaataccatgtaccacaatcccgccgccgacgaggaacatcgccagcgtgccgacaatcgataacgctttcatcaaccagggcgcgataatcaataaccctttacctaatgcctgcatcagcgcgctggatttttccgccagccaataccccaggtcatcaatcttaacgataacccctaccagaccg

SEQ ID NO: 745 - DNA, 225 bp, Escherichia coli
tacagcacctgtgccactttcatgctgttaacttcgttaaacccctggcgcaaaatgccttccgtcgaggcagccacttttagcgcagtggcagaaaaagccgaagtgtatttttcaaacatcgcgcgtttatcgagcaatatacgcataaacagcgccgcgccgacggtattggtaaccatcattggcgcagcaatattactcaccagacgcaccgcatcttca

SEQ ID NO: 746 - DNA, 165 bp, Escherichia coli
tcaccttttgctgattaccgccggagagcgaaccaatttgcgtccgatgccccggtgtttttacccgcatcgaatcaatcacccactgggtatcgcttttcatccgcgagttatccagtaaaccaactttatttttgtagttgcgaatattggaaattaacgagt

SEQ ID NO: 747 - DNA, 342 bp, Escherichia coli
aggaacagacgcatcaccacaccgaagatagcgattttgctcgccgtcgccaggaaggtggaaaccggcgcaggtgcgccctggtatacgtctggcgtccacaggtggaacggcaccagagagagtttgaagccgaggccaacaatcatcagtccgaaacctgccagcaacagcggctcgttgagcataccgtcgccgaggtttttacccaacgcgacaaacgacaggtcgccagactgcgcatacaccagcgccataccgaacagcaggaaagaagacgctgcggcagaaaggatagtgtatttgatactggcttccagcgaacgtttctggcggaaagcg

SEQ ID NO: 748 - DNA, 477 bp, Escherichia coli
cagaacgcaggagatagaaccgataacttcaatggcgcgcatcacttcaccgggtttgtcgccaggggccataaagataggatccagaccggggatcagttcccagccaaggaggaatttcactaccgcggcagcaagaccgagggtgatcaatgcaacgaggaatttggcgaagatctggaagccgttgatcattttttccgggatgaatttcagccccagcgccaccagcaccgcaacgataagtaccgggatcatgttcatcaggatcagcgcaaaggtgaattccaccggctgaccgttgatctgcacaccggagtacatagcaaccagaccaccagcaatacagccaatcggaatggtcacaatgcccgccagcacgccgagcgccagataacgacggtcagaaggttcgataatgccgagcgccaccggaatggaaaacacaatcgttggccccatcatcgacccgagaat

SEQ ID NO: 749 - DNA, 480 bp, Escherichia coli
cccacttcggctcccagcttttctgccagcatagcgatttcctggttatctgcctctccgccctgccccaccaccagcacccgtctggcctcagctaatgggtcacgggtaacatttttcagatcctctgtgctaaccagccagtcgggaagcgcgccggggacaatgttcagttgctgcataccagagggcaatgtggcgtttttcactgctcccgcctggcgggcaagggaaaggcatagcgggcgtttttctgtttgcagcgtcgccgttagcgcatttccccagtgggatttgcgcacgcttacggttgaaatatctaacgaagtcacctggcagatgcttgcaccatgtaaacgccaggccagccgggtcgacagttcatcaccaaacgttcccggcggaaagagaacaacgtccgctggcgttcgctgccactgttccaccagcgcatccagcacctgttccgccactacgggc

SEQ ID NO: 750 - DNA, 417 bp, Escherichia coli; identical to SEQ ID NO: 176

SEQ ID NO: 751 - DNA, 120 bp, Escherichia coli
gccaaggaacatcgggatctctgcgccaacgatcacaccaatagtacctattccgcccatgaccgccccgcgtttaccgccgaccagatgaccacctgtagaaccaatcatcacgggcaa

SEQ ID NO: 752 - DNA, 225 bp, Escherichia coli
actcaagtaatgcttcgtaagtcaggcgtgagtcaacgcgaatgcggtccagttcagcgtcggcaaaatcacgcagaacacgctgcgccagcgccagttcgccgtacagctgataacgagtctgcgggcgctttttacgctccatcactttggtccagacgcgtttcagataagcggcatcggaggccagttcagcctcgccaaccccttccgctgcggtacgga

SEQ ID NO: 753 - DNA, 387 bp, Escherichia coli
cgcggatcggctacgcaaatacctggcgcgttttggtctgacgtgggaagccgtgcaggatcagcacagctccagttgaatatgatggtccgtcagcacctgcatcacgcttactggcggcggggcgtcggtgtagacggcatctaccatgctgatactgcccatattgaccatcgcgttacggccaaatttcgagtgatcgacaaccagcataacgtggcgcgagttctcaataatggcgcgtttggtgcgaacttcgtggtaatcgaactccagcagcgagccgtcgctatcgatgccactaatccccagaatgccgaaatcaaggcggaactgggagataaaatcgagcgtcgcttcgcctatgatcccaccatcgcggctacg

SEQ ID NO: 754 - DNA, 183 bp, Escherichia coli
cgccgggatcatcaccgcaaagatgatacgacgggccagcggtgcgccaaaaatacgcacggtcaggtcggtagcaaggaaaataaacggaaagctaaacgcgccccaggtggtatggaaaccaaaaatggagacgggaagctgaaccagatagttactggaggtgatcaccaaaagatgaaa

SEQ ID NO: 755 - DNA, 528 bp, Escherichia coli
gctgcattccctttcgccatcggagccagtgccgcaggcaactctttacccagcccttgcaccagcgaatcttgcgtaatttcgctaatcgatttcgcgccagtcagcgtcattgccactttcatctctttttcgatcagattcagcaggttagctacacccgcctggcccgctgttgccagcgcatacaggaaagcacgacccagcagtacggtgtcggcaccgagcgcaatcatacgcacgacatcaagcccgttacgaatcccgctatctgccagaatggcgatatcacctttcacggcatccgcaatagcgggcaatgcacgagcggaagagagtacaccgtccagctggcggccaccgtggttagaaaccacaatcccatcagcaccaaaacgtactgcatcgcgcgcatcttccggatcgaggatccctttgatcaccatcgggccatcccagaaatcgcggatccactcaaggtctttccatgagatggacggatcgaagttattccccagccagccgatg

SEQ ID NO: 756 - DNA, 225 bp, Escherichia coli
gcgccacgatacgcggcacggcaagttgcaaagaggattcgccgcgcagcaccggacgcgcagcctctgtcagttgtagggcagaatgctgggcaatattttgcgtcaccaggccgaggtgaatcagctggcggatcacgctcacccaatgttcatggcttttatcacggcccatgccatagactttcagtttgtcatgaccatagtcgcggatacgctggttat

SEQ ID NO: 757 - DNA, 585 bp, Escherichia coli
ccacgcatcaacggcaatcatcgcccgtttgataatgtcggcggcggttccctgcattggcgcgttaatggctgcacgttcagccgctgcacgacgagcaccattgctggatttgatatccggcagatacagacggcgtccgtccagtgtttcaacgtagccctgctctttcgcctgagcacgggtgcgttccatatactccagcacgccagggtagcgttcgaagtaaaggtccatgtacttctgcgcttctttacgtggaatgttcaattgccgcgccagaccgaaagcactcatgccataaatcagaccaaagttgatcgctttcgcgctacggcgttgctcgctggtgacggtttccagtggcaaaccaaacacttctgccgccgtagcccggtggatatcttttccttccgcgaatgcggtcagcaagcctttgtcacgcgagagatgcgccataatgcgcagttcaatctgcgagtagtccgccgagacaatcacataatcctctggcccaataaacgcctggcggatacgacgaccttcttcgttacgcaccggaatgttttgcaggttaggatcggt

SEQ ID NO: 758 - DNA, 438 bp, Escherichia coli
catcgttggcgttgttcaggtcatcgagagtttcaaacagcggagcaaccggcatcgcaaacccgatacccgcttctttcagcagcaggtggacagccagcacgtcggacggcgttttcgccatcgagatcacgtaggcggcaatggagccttgcggcgcttcggcaatcacctggcaggtatcgagcacttcgcgcgtttcggcgcttggttgccagttgcgcggtagcagcggacgtttggagttcagttcgcggatcaggaatgcctgtttgtcggcctctgaccagctttcataatcgccgatgccgagatagcgggtcagctcgcccaatgcttcggtatggcgggtgctctcctgacggatatcaatacggaccagcggtacgccgaaacatttcacgcggcgcagggtgtcgagcagatcgccgttggcga

SEQ ID NO: 759 - DNA, 165 bp, Escherichia coli
gaagagcgttcagagctggtggcaatccatgcgcccaacaggaaaatcggtgccagcacaaacagcaattcgacaatattgtccagccagggcatgaccagtaacgtgaataacagcgccagaattgcaccgaagaaggcaccgccaaaacgcagcgccattttc

SEQ ID NO: 760 - DNA, 222 bp, Escherichia coli
tcttctggaactcggccagcatcgggtcgaccacgtcaatggcattaccctgctcatccacgccctgggtgtaacgcatccagccagccacgcccagcgccaggtgacgccagctgccgccgttttgcaggtgcagacgcaccggatccagcagacgctgcggtaacttctggctgccgtccatcgcaatctgccaggtacggtgacgcagagacgggttgc

SEQ ID NO: 761 - DNA, 165 bp, Escherichia coli
ctgcgcactcggcatttcaccatgaaactccgccatttgttggcgcagcatgatggggtaacgccaaatcaccacattcaaaaaactgccgatgatcaatcctccgacggttgccagtatgggcatcgccgcggggtattgctgaaaaacatcaaaaagcatggt

SEQ ID NO: 762 - DNA, 324 bp, Escherichia coli; identical to SEQ ID NO: 172

SEQ ID NO: 763 - protein, 638 aa, Escherichia coli; identical to SEQ ID NO: 301

SEQ ID NO: 764 - protein, 566 aa, Escherichia coli
MAIAIGLDFGSDSVRALAVDCASGEEIATSVEWYPRWQKGQFCDAPNNQFRHHPRDYIESMEAALKTVLAELSVEQRAAVVGIGVDSTGSTPAPIDADGNVLALRPEFAENPNAMFVLWKDHTAVEEAEEITRLCHAPGNVDYSRYIGGIYSSEWFWAKILHVTRQDSAVAQSAASWIELCDWVPALLSGTTRPQDIRRGRCSAGHKSLWHESWGGLPPASFFDELDPILNRHLPSPLFTDTWTADIPVGTLCPEWAQRLGLPESVVISGGAFDCHMGAVGAGAQPNALVKVIGTSTCDILIADKQSVGERAVKGICGQVDGSVVPGFIGLEAGQSAFGDIYAWFGRVLGWPLEQLAAQHPELKEQINASQKQLLPALTEAWAKNPSLDHMPVVLDWFNGRRTPNANQRLKGVITDLNLATDAPLLFGGLIAATAFGARAIMECFTDQGITVNNVMALGGIARKNQVIMQACCDVLNRPLQIVASDQCCALGAAIFAAVAAKVHADIPSAQQKMASAVEKTLQPRSEQAQRFEQLYRRYQQWAMSAEQHYLPTSAPAQAAQAVPTL

SEQ ID NO: 765 - protein, 495 aa, Escherichia coli
VADRNLRDLLAPWVPDAPSRALREMTLDSRVAAAGDLFVAVVGHQADGRRYIPQAIAQGVAAIIAEAKDEATDGEIREMHGVPVIYLSQLNERLSALAGRFYHEPSDNLRLVGVTGTNGKTTTTQLLAQWSQLLGETSAVMGTVGNGLLGKVIPTENTTGSAVDVQHELAGLVDQGATFCAMEVSSHGLVQHRVAALKFAASVFTNLSRDHLDYHGDMEHYEAAKWLLYSEHHCGQAIINADDEVGRRWLAKLPDAVAVSMEEHINPNCHGRWLKAIDVNYHDSGATIRFSSSWGDGEIESHLMGAFNVSNLLLALATLLALGYPLADLLKTAARLQPVCGRMEVFTAPGKPTVVVDYAHTPDALEKALQAARLHCAGKLWCVFGCGGDRDKGKRPLMGAIAEEFADVAVVTDDNPRTEEPRAIINDILAGMLDAGHAKVMEGRAEAVTCAVMQAKENDVVLVAGKGHEDYQIVGNQRLDYSDRVTVARLLGVIA

SEQ ID NO: 766 - protein, 582 aa, Escherichia coli
VQEQLASRIGSDVLLCPLYGALSLNDQRKAILPAPQGMRKVVLATNIAETSLTIEGIRLVVDCAQERVARFDPRTGLTRLITQRVSQASMTQRAGRAGRLEPGICLHLIAKEQAERAAAQSEPEILQSDLSGLLMELLQWGCSDPAQMSWLDQPPAVNLQAAKRLLRMLGALDGERLSVHGQKMAALGNDPRLAAMLVSAKSDDEAATAAKIAAILEEPPRMGNSDLGVAFSRNQPAWQQRSQQLLKRLNVRGGEADSSLIAPLLAGAYADRIARRRGQDGRYQLANGMGAMLDADDALSRHEWLIAPLLLQGSASPDARILLALPVDIDELVQRCPQLVQQSDTVEWDDAQGTLKAWRRLQIGQLTVKVQPLAKPSEDELHQAMLNGIRDKGLSVLNWTAEAEQLRLRLLCAAKWLPEYDWPAVDDESLLATLETWLLPHMSGVHSLRGLKSLDIYQALRGLLDWGMQQRLDSELPAHYTVPTGSRIAIRYHEDNPPALAVRMQEMFGEATNPTIAQGRVPLVLELLSPAQRPLQITRDLSAFWKGAYREVQKEMKGRYPKQVWPDDPANTAPTRRTKKYS

SEQ ID NO: 767 - protein, 844 aa, Escherichia coli
MAGNDREPIGRKEKPTRPVKQKVSRRRYEDDDDYDDYDDYEDEEPMPRKGKGKGKGRKPRGKRGWLWLLLKLAIVFAVLIAIYGVYLDQKIRSRIDGKVWQLPAAVYGRMVNLEPDMTISKNEMVKLLEATQYRQVSKMTRPGEFTVQANSIEMIRRPFDFPDSKEGQVRARLTFDGDHLATIVNMENNRQFGFFRLDPRLITMISSPNGEQRLFVPRSGFPDLLVDTLLATEDRHFYEHDGISLYSIGRAVLANLTAGRTVQGASTLTQQLVKNLFLSSERSYWRKANEAYMALIMDARYSKDRILELYMNEVYLGQSGDNEIRGFPLASLYYFGRPVEELSLDQQALLVGMVKGASIYNPWRNPKLALERRNLVLRLLQQQQIIDQELYDMLSARPLGVQPRGGVISPQPAFMQLVRQELQAKLGDKVKDLSGVKIFTTFDSVAQDAAEKAAVEGIPALKKQRKLSDLETAIVVVDRFSGEVRAMVGGSEPQFAGYNRAMQARRSIGSLAKPATYLTALSQPKIYRLNTWIADAPIALRQPNGQVWSPQNDDRRYSESGRVMLVDALTRSMNVPTVNLGMALGLPAVTETWIKLGVPKDQLHPVPAMLLGALNLTPIEVAQAFQTIASGGNRAPLSALRSVIAEDGKVLYQSFPQAERAVPAQAAYLTLWTMQQVVQRGTGRQLGAKYPNLHLAGKTGTTNNNVDTWFAGIDGSTVTITWVGRDNNQPTKLYGASGAMSIYQRYLANQTPTPLNLVPPEDIADMGVDYDGNFVCSGGMRVLPVWTSDPQSLCQQSEMQQQPSGNPFDQSSQPQQQPQQQPAQQEQKDSDGVAGWIKDMFGSN

SEQ ID NO: 768 - protein, 265 aa, Escherichia coli; identical to SEQ ID NO: 308

SEQ ID NO: 769 - protein, 296 aa, Escherichia coli
MSGLPLISRRRLLTAMALSPLLWQMNTAHAAVIDPNRIVALEWLPVELLLALGIVPYGVADTINYRLWVSEPPLPDSVIDVGLRTEPNLELLTEMKPSFMVWSAGYGPSPEMLARIAPGRGFNFSDGKQPLAMARKSLTEMADLLNLQSAAETHLAHYEDFIRSMKPRFVKRGARPLLLTTLIDPRHMLVFGPNSLFQEILDEYGIPNAWQGETNFWGSTAVSIDRLAAYKDVDVLCFDHDNSKDMDALMATPLWQAMPFVRAGRFQRVPAVWFYGATLSAMHFVRILDNAIGGKA

SEQ ID NO: 770 - protein, 185 aa, Escherichia coli; identical to SEQ ID NO: 310

SEQ ID NO: 771 - protein, 1175 aa, Escherichia coli
VFRFPTSRLFSTLRSALRPAMPRFRVSAAWLLALAWIFLLVWIWWQGPKWTLYEQHWLAPLTNRWLATAVWGLIALIWLTWRVMKRLQKLEKQQKQQREEEKDPLTVELHRQQQYLDHWLLRLRRHLDNRRYLWQLPWYMVIGPAGSGKSALLREGFPSDIIYTPESIRGTEYHPLITPRVGNQAVIFDVDGVLTSPGGDDLLHRRLREHWLGWLMQTRARQPLNGLILTLDLPDLLTADKSRRETLVQNLRQQLQEIRQSLHCRLPVYVVLTRLDLLTGFAALFHSLDKKDRDAILGVTFTRRAHESDDWRSELGAFWQTWVQQVNLALSDLMLAQTGAAPRSAVFSFSRQMQGTGEIVTALLAALLDGENMDVMLRGVWLTSSLQRGQVDDIFTQSAARQYGLGNSSLATWPLVETTPYFTRRLFPEVLLAEPNLAGENSVWLNSSRRRLTAFSACGAALAALLVGSWHHYYNQNWQSGVNVLAQAKAFMDVPPPQGTDEFGNLQLSLLNPVRDATLAYGDYRDRGFLADMGLYQGVRVGPYVEQTYIQLLEQRYLPSLMNGLIRDLNNAPPESEEKLAVLRVLRMMEDKSGRNNEAVKQYMARRWSNEFHGQRDIQAQLMAHLDYALEHTDWHAQRQSGDSDAVSRWTPYDKPVINAQQELSKLPIYQRVYQTLRTKALSVLPADLNLRDQVGPTFDNVFVAGNDEKLVIPQFLTRYGLQSYFVKQREGLVELTALDSWVLNLTQSVAYSEADREEIQRHITEQYISDYTATWRAGMDNLNVRDYEAMSALTDALEQIISGDQPFQRALTALRDNTHALTLSGKLDDKAREAAINEMDYRLLSRLGHEFAPENSALEEQKDKASTLQAVYQQLTELHRYLLAIQNSPVPGKSALKAVQLRLDQNSSDPIFATRQMAKTLPAPLNRWVGKLADQAWHVVMVEAVRYMEVDWRDNVVKPFNEQLADNYPFNPRATQDASLDSFERFFKPDGILDNFYKNNLRLFLENDLTFGDDGRVLIREDIRQQLDTAQKIRDIFFSQQNGLGAQFAVETVSLSGNKRRSVLNLDGQLVDYSQGRNYTAHLVWPNNMREGNESKLTLIGTSGRAPHSIAFSGPWAQFRLFGAGQLTNVTSDTFNVRFNVDGGAMVYRVHVDTEDNPFTGGLFSLFRLPDTLY

SEQ ID NO: 772 - protein, 732 aa, Escherichia coli
MKFDKPAGENPIDQLKVVGRPHDRIDGPLKTTGTARYAYEWYEEAPNAAYGYIVGSAIAKGRLTALDTDAAQKAPGVLAVITASNAGALGKGDKNTASLLGGPTIEHYHQAIALVVAETFEQARAAASLVQAHYRRNKGAYSLADEKQAVSQPPEDTPDKNVGDFDGAFTSAAVKIGATYTTPDQSHMAMEPHASMAVWDGNKLTLWTSNQMIDWCRTDLAKTLKVPVENVRIISPYIGGGFGGKLFLRSDALLAALAARAVKRPVKVMLPRPTIPNNTTHRPATLQHLRIGTDQSGKITAISHESWSGNLPGGTPETAVQQSELLYAGANRHTGLRLATLDLPEGNAMRAPGEAPGLMALEIAIDELAEKAGIDPVEFRILNDTQVDPADPTRRFSRRQLIECLRTGADKFGWKQRNATPGQVRDGEWLVGHGVAAGFRNNLLEKSGARVHLEQNGTVTVETDMTDIGTGSYTILAQTAAEMLGVPLEQVAVHLGDSSFPVSAGSGGQWGANTSTSGVYAACVKLREMIASAVGFDPEQSQFADGKITNGTRSAMLHGATAGGRLTAEESIEFGTLSKEYQQSTFAGHFVEVGVHSATGEVRVRRMLAVCAAGRILNPKTARSQVIGAMTMGMGAALMEELAVDDRLGYFVNHDMAGYEVPVHADIPKQEVIFLDDTDPISSPMKAKGVGELGLCGVSAAIANAVYNATGIRVRDYPITLDKLLDKLPDVV

SEQ ID NO: 773 - protein, 318 aa, Escherichia coli
MKAFTYERVNTPAEAALSAQRVPGAKFIAGGTNLLDLMKLEIETPTHLIDVNGLGLDKIEVTDAGGLRIGALVRNTDLAAHERVRRDYAVLSRALLAGASGQLRNQATTAGNLLQRTRCPYFYDTNQPCNKRLPGSGCAALEGFSRQHAVVGVSEACIATHPSDMAVAMRLLDAVVETITPEGKTRSITLADFYHPPGKTPHIETDLLPGELIVAVTLPPPLGGKHIYRKVRDRASYAFALVSVAAIIQPDGSGRVALGGVAHKPWRIEAADAQLSQGAQAVYDALFASAHPTAENTFKLLLAKRTLASVLAEARAQA

SEQ ID NO: 774 - protein, 547 aa, Escherichia coli
MRVNLLIAMIIFALIWPATALRAAVSKTTWADAPAREFVFVENNSDDNFFVTPGGALDPRLTGANRWTGLKYNGSGTIYQQSLGYIDNGYNTGLYTNWKFDMWLENSPVSSPLTGLRCINWYAGCNMTTSLILPQTTDASGFYGATVTSGGAKWMHGMLSDAFYQYLQQMPVGSSFTMTINACQTSVNYDASSGARCKDQASGNWYVRNVTHTKAANLRLINTHSLAEVFINSDGVPTLGEGNADCRTQTIGSRSGLSCKMVNYTLQTNGLSNTSIHIFPAIANSSLASAVGAYDMQFSLNGSSWKPVSNTAYYYTFNEMKSADSIYVFFSSNFFKQMVNLGISDINTKDLFNFRFQNTTSPESGWYEFSTSNTLIIKPRDFSISIISDEYTQTPSREGYVGSGESALDFGYIVTTSGKTAADEVLIKVTGPAQVIGGRSYCVFSSDDGKAKVPFPATLSFIARNGATKTYDAGCDDSWRDMTDALWLTTPWTDISGEVGQMDKTTVKFSIPMDNAISLRTVDDNGWFGEVSASGEIHVQATWRNIN

SEQ ID NO: 775 - protein, 238 aa, Escherichia coli
MYQQGYPPALFLDGIVMKKHLLPLTLLFSGISPAQALDVGDISSFMNSDSSTLSKTIQNSTDSGRLINIRLERLSSPLDDGQVIAMDKPDELLLTPASLLLPAQASEVIRFFYKGPVDEKERYYRIVWFDQALSDAQRENANRSAVATASARIGTILVVAPRQANYRFQYANGSLTNTGNATLRILAYGPCLKAANGKECKENYYLMPGKSRRFTRVDTADNKGRVALWQGDKFIPVK

SEQ ID NO: 776 - protein, 1161 aa, Escherichia coli
MYEQYYGDEVGLFGKDKRQKDPHAITAEVNYTPVPLLTLSAGHKQGKSGENDTRFGLEVNYRIGEPLEKQLDTDSIRERRMLAGSRYDLVERNNNIVLEYRKSEVIRIALPERIEGKGGQTLSLGLVVSKATHGLKNVQWEAPSLLAEGGKITGQGSQWQVTLPAYRPGKDNYYAVSAIAYDNKGNASKRVQTEVVISGAGMSADRTALTLDGQSRIQMLANGNEQKPLVLSLRDAEGQPVTGMKDQIKTELTFKPAGNIVTRTLKATKSQAKPTLGEFTETEAGVYQSVFTTGTQSGEATITVSVDGMSKTVTAELRATMMDVANSTLSANEPSGDVVADGQQAYTLTLTAVDSEGNPVTGEASRLRLVPQDTNGVTVGAISEIKPGVYSATVSSTRAGNVVVRAFSEQYQLGTLQQTLKFVAGPLDAAHSSITLNPDKPVVGGTVTAIWTAKDANDNPVTGLNPDAPSLSGAAAAGSTASGWTNNGDGTWTAQITLGSTAGELEVMPKLNGQDAAANAAKVTVVADALSSNQSKVSVAEDHVKAGESTTVTLIAKDAHGNAISGLSLSASLTGTASEGATISSWTEKGDGSYVATLTTGGKTGELRVMPLFNGQPAATEAAQLTVIAGEMSSANSTLVADNKTPTVKTTTELTFTVKDAYGNPVTGLKPDAPVFSGAASTGSARPSAGSWTEQSNGVYVATLTLGSAAGQLSVMPRVNGQNAVAQPLVLNVAGDASRAVISDMAVKVNNQLANGQSANQVTLTVVDSYGNPLQGQEVTLTLPQGVTSKTGNTVTTNAAGKADIELISTVAGELEIAAAVKNSQKTVTVKFNADASTGQANLQVDTAVQKVANGKDAFTLTATVEDKNGNPVPGTLVTFNLPRGVKPLTGDNVWVKANDEGKAELQVVSVTAGTYEITASAGNDQPSDAQTITFVADKATATVSGIEVIGNYALADGKAKQTYKVTVTDANNNLLKDSDVTLTASPASLNLEPNGTATTNEQGQAIFTATTTVAATYTLKAQVSQTNGQVSTKTAESKFVADDKNAELTASSDVQSLVADGKSTAKLEVTLFSANNPVGGNVWVDIEAPEGVTEKDYQFLPSKNDHFVSGKITRTFSTSKPGVYTFTFNALTYGGYEMKPVTVTITAVDADTAKGEEAMK

SEQ ID NO: 777 - protein, 511 aa, Escherichia coli
MSDFWYSFPMRLCTTCSRITLYWSKDMTISNSNLLKPFITGTELPPFKEDVFSKTEEQFKKSPHGKLLFISGNENLVNISAEKIDEIKNSKDFFSNIVNIIILLIKHPEKILPILHGCPVESIELIKNAKRTGQWSYEMTDKNGQSIEVSYIFTDTIDNNYDGKLCLKICNSCNQNDSSTHEYKIDHQQLKNHIRQLEEWALLEKFYDSNAYYSKRTKQLEKKIADAGFIAGKVNADNFNVKEFRADIASMLCEQPPMRTHQISSSGYLSADKVPDLYKTNLKDAQRDLKTTPVDIDGVSLKSKTREKIAKKTEEENAKKTAEIIAKQNAKTIEEKNSEKNKKESNPEDNFVLKFSPEEINEMLLDYSDEEQKKLRPFFTSDHIYCLFDAFSQDLHNVARNGSPRYAGLLRQIASKTAKLQDIDQLLFWRTFSGGVFHRRISVNSEPEKTDVWRFSSQFDFPHINENGELSRTVLMFEGVAESNFKDIANHSSECFTYSCYAAPLDANAKK

SEQ ID NO: 778 - protein, 605 aa, Escherichia coli
MMLNAWHLPVPPFVKQSKDQLLITLWLTGEDPPQRIMLRTEHDNEETSVPMHKQRSQPQLGVTAWRAAIDLSSGQPRRRYSFKLLWHDRQRWFTPQGFSRMPPARLEQFAVDVPDIGPQWAADQIFYQIFPDRFARSLPREAEQDHVYYHHAAGQEIILRDWDEPVTAQAGGSTFYGGDLDGISEKLPYLKKLGVTALYLNPVFKAPSVHKYDTEDYRHVDPQFGGDGALLRLRHNTQQLGMRLVLDGVFNHSGDSHAWFDRHNRGTGGACHNPESPWRDWYSFSDDGTALDWLGYASLPKLDYQSESLVNEIYRGEDSIVRHWLKAPWSMDGWRLDVVHMLGEAGGARNNMQHVAGITEAAKETQPEAYIVGEHFGDARQWLQADVEDAAMNYRGFTFPLWGFLANTDISYDPQHIDAQTCMAWMDNYRAGLSHQQQLRMFNQLDSHDTARFKTLLGRDIARLPLAVVWLFTWPGVPCIYYGDEVGLDGKNDPFCRKPFPWQVEKQDTALFALYQRMIALRKKSQALRRGGCQVLYAEDNVVVFVRVLNQQRVLVAINRGEACEVVLPASPFLNVAQWQRKEGHGQLTDGILALPAISATVWIN

SEQ ID NO: 779 - protein, 511 aa, Escherichia coli; identical to SEQ ID NO: 777

SEQ ID NO: 780 - protein, 2508 aa, Escherichia coli
VVSVNTVAGDDILNNAEQAVAQIISGQVSGASPGDTVTVKLGTHVLTGIVLADGSWNVALDPAVTRTLDRGANTIFVTVTDAAGNTGAASRAITLVGVSPLITINTVSGDDIISGAEKGAPLTLTGSTQQAETGQTVTVTLAGQSFTTTVQADGSWSLTVPAAAMGNLPDGAVAITASVTDLSGNTGNTSRTITVDSQAPALSIDPLTADNIINAAESGQDLPITGTTDAQPGQTVTVTLNGQTYQGVVQSDGTWSVTVPAANVGALADGNATVTASVNDVAGNPTSVSRVALVDATPPVVTINPVATDNVINTPEHTQAQIISGTVTGAQAGDIVTVTLNNSDYTTVVDGSGNWSLGVPASVVSGLVDGSYPVSVSVTDRAGNSGSQSLTVTVNTAAPLIGINSIAGDDVINASEKGTDVQITGTSDQPVNTAITVTLNGQNYTTTTDASGNWSVTVPASAVTALGQANYTVTAAVTSSIGNSNTASHNVLVDSALPGVTINPVATDDIINAAEAGVAQTISGQVTGAEDGDTVTITLGGNTYTATVGSNLTWSVSVPAADIQALGNGDLTVSASVTNQNGNTGSGTRDITIDANLPGLRIDTVAGDDVVNIIEHGQALVVSGSSSGLAEGTPLTVTINNVEYTTAVQADGSWSVGVTAAQVSAWPAGTINIAVSGESSAGNPISITHPVTVDLTPAAITINTIATDDVINGAEKGADLTLSGTTTNVEAGQTVTVTFGGKNYTASVASDGSWSATVPAADLALLTDGSASAQASVSNINGNSASAVHNYSVDSSAPTIIINTVASDNIVNASEADAGVTVSGSTTAEAGQIVTVTLNSPTVQTYQATVQADGSWSINIPAADLEALTDGSHTLTATVNDKAGNPASTTHNLAVDLTVPVLTINTIAGDDIINAAEHGQALVISGSSTGGEAGDVVTVTLNSKTYTTTLDASGNWSVGVPAADATALGSGPQTVMATVTDAAGNSDSETHTVTVNLTAPTIGINTIATDDIINATEKGADLQISGTSNQPAGTTITLTLNGQNYTATTDAAGNWSTIVPASAVGALGEASYTVTANVTDSAGNSNSASHNVQVNTALPGVTINPVASDDIINAAESGVAQTISGQVTGAAAGDTVTVTLGGKTYTATVQGNLSWSVDVPAADIQAIGNGELTVNASVTNGVGNTGSGSRDIVIDANLPGLRVDTVAGDDVVNSIEHSQALVITGSSSGLAAGAALTVVINTVTYAATVLADGIWSLGVPAADVGNWPAGTVNITVSGATSAGNPVTITHPVTVDLAAVAISINTVSGDDVINAAEKGADLTLSGSTSGVEAGQTVTVTFGGKTYTATVAGDGSWTTTVPAADLSALRDGDATVQASVSNINGNTASATHAYSVDATAPTLAINTIATDDILNAAEAGNPLTISGSSTAEAGQTVTVTLNGVTYTGTVLADGSWSVSVPTADLSNLTASQYTVSASVSDKAGNPATATHGLAVDLTVPVLTINTVSGDDIINAAEHGQALVISGSSTGGEAGDVITVTLNSKTYTTTLDASGNWSVGVPAADVTALGSGPQTITATITDIAGNSDDASRTVTVNLTVPTIGINTIASDDVINATEKGADLQITGTSNQPAGTTITVTLNGQNYTATTDSSGNWSATVPASAVSALGEANYTVTANVTDSAGNSNSASHNVLVNSALPAVTINAVATDDIINAAESGNAQTISGQVTGAAAGDTVTVTLGGNTYTATVQANLSWSVDVPAADIQALGNGDLTVNASVTNSVGNTGSGSRDITIDANLPGLRVDTVAGDDVINSIEHNQALVITGSSSGLTAGTALTVEINNVTYAATVLADGTWNLGVPAADVSNWPAGTVDITVSGTNSAGTTSTITHPVTVDLAAVAITINTLSGDDVINAVEKGETLVVSGSTSGVEAGQTVTVTFGGKNYTTTVEANGSWTVNVPPADLAALPDGAGNVQASVSNINGNNAQADRAYSVDATAPLVTINTIASDDILNVSEAGAGITISGTTTAQAGQTLTVTLNNNTYQTTVLADGTWSVNVPATDLSGLTASSYTVTATVSDKAGNPASADHALAVDVTAPDLTINTVAGDDIINAIEHGQALVVSGTSTGAAAGDVVTVNLNGKNYTTTLDASGNWSVGIPAVDVTALATGSQTITASLSDRAGNSDSTTHNVTVDLSGPTLTISTVSDDDIINSTEKTQDLTISGGSSGLATGTTVTVMLNGLAYSATTDSSGNWSVTVPASAVGALGEAVYQISASATDSAGNSGSTTHTVNVESLLPGVIINTVAGDDIINAAEIVVAQTISGQVTGTAAAGNTVTVTIGGNQYTATVQSDLSWSVSVPANVLQALGNGELTISASVTNGVGNTGTTTHDIVIDANLPGLRVDTVAGDDVVNIIEHGQALVVTGSSSGLAAGAALTVVINSVTYGATVLADGTWSVGVPAADVTNWPAGTVNIAVSGTNTAGTTTSITHPVTVDLAAVAITITPFPLTM

SEQ ID NO: 781 - protein, 717 aa, Escherichia coli
MKTVKLSLLAVVVATAVSPSAFAGDTVEAATTELTVIQPGMSQSEIDQKIGRFLERTGNSVAAQNYLIAHDYQTTTPQENTAASPVQPTNTLNPITNQAQTDRDNGQDTAIQDAQHAANWASLKADDAQHAITVAQTDIDANTAAITDTRNDVSAVQSDVTNIKGDVAHAQSTADHANANANTALINGVKLSGAVTENKNNIEQNRSDIADQQKLLASNEQKQIVRDNGQDTAIQDAQHAANWASLKADDAQHAITVAQTDIDANKAAITDIRNDVSAVQSDVTNIKGDVAHAQSTADHANANANTALMNGVKLSSAVTENKNNIEQNRSDIADQQKLLASNEQKQIVRDNGQDTAIQDAQHAANWASMKADDAQHAITVAQTDIDANKAAIADTRNDVSAVQSDVTNIKGDVAHAQSTADHANANANTALINGVKLSGAVTENKNNIEQNRSDIADQQQQLDETRKIVAATGDVQTAARYQSMIDARQTAAANAQQAQADTQQQQMDDQQKQIDATQKTVSALGDAQTNAHYQEMVNAGLRAQNDANARTAAEQKQKIDTLATNQATQQHINSVQYGEQIQRLAQDSTQTHEQIDSLTQDVTQTHQQLSNTQKRVADNSQQITTLNNHFSSLKNEVEDNRKEANAGTASAIAIASQPQVKAGDFMMMSAGAGTFNGESAVSVGTSFNAGTHTVIKAGVSADTQSDFGAGVGVGYSF

SEQ ID NO: 782 - protein, 990 aa, Escherichia coli
MKENNLNRVIGWSGLLLTSLLSTSALADNIGTSAEELGLSDYRHFVIYPRLDKALKAQKNNDEATAIREFEYIHQQVPDNIPLALYLAEAYRYFGHDDRARLLLEDQLKRHPGDARLERSLAAIPVEVKSVTTVEELLAQQKACDAAPTLRCRSEVGQNALRLAQLPVARAQLNDATFAASPEGKTLRTDLLQRAIYLKQWSQADTLYNEARQQNTLSAAERRQWFDVLLAGQLDDRILALQSQGIFTDPQSYITYATALAYRDEKARLQRYLIENTPLFTTDAQEKSWLYLLSKYSGNPVQALANYTVQFADNRQYVVGATLPVLLKEGQYDAAQKLLATLPANEMLEERYTVSVATHNKAEALRLARLLYQQEPANLTRLDQLTWQLMQNEQSREAADLLLQRYPFQGDARVSQTLMARLASLLESHPYLATPAKVAILSKPLPLAEQRQWQSQLPGIADNCPAIVRLLGDMSPSYDAAAWNRLAKCYRDTLPGVALYAWLQAEQRQPNAWQHRAVAYQAYQVEDYATALAAWQKISLHDMSNEDLLAAANTAQAAGNGAARDRWLQQAEQRGLGNNALYWWLHAQRYIPGQPELALNDLTRSINIAPSANAYVARATIYRQRHNVPAAVSDLRAALELEPNNSNTQAALGYALWDSGDIAQSREMLEQAHKGLPDDPALIRQLAYVNQRLDDMPATQHYARLVIDDIDNQALITPLTPEQNQQRFNFRRLHEEVGRRWTFSFDSSIGLRSGAMSTANNNVGGAAPGKSYRSYGQLEAEYRIGRNMLLEGDLLSVYSRVFADTGENGVMMPVKNPMSGTGLRWKPLRDQIFFLAVEQQLPLNGQNGASDTMLRASASFFNGGKYSDEWHPNGSGWFAQNLYLDAAQYVRQDIQAWTADYRVSWHQKVANGQTIEPYAHVQDNGYRDKGTQGAQLGGVGVRWNIWTGETHYDAWPHKVSLGVEYQHTFKAINQRNGERNNAFLTIGVHW

SEQ ID NO: 783 - protein, 556 aa, Escherichia coli
MDNAELAIGIDLGTTNSLIAVWKDGAAQLIPNKFGEYLTPSIISMDENNHILVGKPAVSRRTSHPDKTAALFKRAMGSNTNWRLGSDTFNAPELSSLVLRSLKEDAEEFLQRPIKDVVISVPAYFSDEQRKHTRLAAELAGLNAVRLINEPTAAAMAYGLHTQQNTRSLVFDLGGGTFDVTVLEYATPVIEVHASAGDNFLGGEDFTHMLVDEVLKRAAVAKNMLNESELAALYTSVEAAKCGNQLPLQISWQYQEETRECEFYENELEDLWLPLLNRLRVPIEQALRDARLKPSQIDSLVLVGGASQMPLVQRIAVRLFGKLPYQSYDPSTIVALGAAIQAACRLRSEDIEEVILTDICPYSLGVEVNRQGVSGIFSPIIERNTTVPVSRVETYSTMHPEQDSITVNVYQGENHKVKNNILVESFDVPLKKTGAYQSIDIRFSYDINGLLEVDVLLEDGSVKSRVINHSPVTLSAQQIEESRTRLSALKIYPRDMLINRTFKAKLEELWARALGDEREEIGRVITDFDAALQSNDMARVDEVRRRASDYLAIEIP

SEQ ID NO: 784 - protein, 165 aa, Escherichia coli
MPPSLRKAVAAAIGGGAIAIASVLITGPSGNDGLEGVSYIPYKDIVGVWTVCHGHTGKDIMLGKTYTKAECKALLNKDLATVARQINPYIKVDIPETTRGALYSFVYNVGAGNFRTSTLLRKINQGDIKGACDQLRRWTYAGGKQWKGLMTRREIEREICLWGQQ

SEQ ID NO: 785 - protein, 583 aa, Escherichia coli
VTRQDMNDAVITLNGLEKRFPGMDKPAVAPLDCTIHAGYVTGLVGPDGAGKTTLMRMLAGLLKPDSGSATVIGFDPIKNDGALHAVLGYMPQKFGLYEDLTVMENLNLYADLRSVTGEARKQTFSRLLEFTSLGPFTGRLAGKLSGGMKQKLGLACTLVGEPKVLLLDEPGVGVDPISRRELWQMVHELAGEGMLILWSTSYLDEAEQCRDVLLMNEGELLYQGEPKALTQTMAGRSFLMTSPHEGNRKLLQRALKLPQVSDGMIQGKSVRLILKKEATPDDIRHADGMPEININETTPRFEDAFIDLLGGAGTSESPLGAILHTVEGTPGETVIEAKELTKKFGDFAATDHVNFAVKRGEIFGLLGPNGAGKSTTFKMMCGLLVPTSGQALVLGMDLKESSGKARQHLGYMAQKFSLYGNLTVEQNLRFFSGVYGLRGRAQNEKISRMSEAFGLKSIASHATDELPLGFKQRLALACSLMHEPDILFLDEPTSGVDPLTRREFWLHINSMVEKGVTVMVTTHFMDEAEYCDRIGLVYRGKLIASGTPDDLKAQSANDEQPDPTMEQAFIQLIHDWDKEHSNE

SEQ ID NO: 786 - protein, 760 aa, Escherichia coli
MENNRNFPARQFHSLTFFAGLCISITPVAQALAAEGQANADDTLVVEASTPSLYAPQQSADPKFSRPVADTTRTMTVISEQVIKDQGATNLTDALKNVPGVGAFFAGENGNSTTGDAIYMRGADTSNSIYIDGIRDIGSVSRDTFNTEQVEVIKGPSGTDYGRSAPTGSINMISKQPRNDSGIDASASIGSAWFRRGTLDVNQVIGDTTAVRLNVMGEKTHDAGRDKVKNERYGVAPSVAFGLGTANRLYLNYLHVTQHNTPDGGIPTIGLPGYSAPSAGTAALNHSGKVDTHNFYGTDSDYDDSTTDTATMRFEHDINDNTTIRNTTRWSRVKQDYLMTAIMGGASNITQPTSDVNSWTWSRTANTKDVSNKILTNQTNLTSTFYTGSIGHDVSTGVEFTRETQTNYGVNPVTLPAVNIYHPDSSIHPGGLTRNGANANGQTDTFAIYAFDTLQITRDFELNGGIRLDNYHTEYDSATACGGSGRGAITCPAGMAKGSPVTTVDTAKSGNLVNWKAGALYHLTENGNVYINYAVSQQPPGGNNFALAQSGSGNSANRTDFKPQKANTSEIGTKWQVLDKRLLLTAALFRTDIENEVEQNDDGTYSQYGKKRVEGYEISVAGNITPAWQVIGGYTQQKATIKNGKDVAQDGSSSLPYTPEHAFTLWSQYQATDDISVGAGARYIGSMHKGSDGAVGTPAFTEGYWVADAKLGYRVNRNLDFQLNVYNLFDTDYVASINKSGYRYHPGEPRTFLLTANMHF

SEQ ID NO: 787 - protein, 240 aa, Escherichia coli
MTPTIELICGHRSIRHFTDEPISEAQREAIINSARATSSSSFLQCSSIIRITDKALREELVTLTGGQKHVAQAAEFWVFCADFNRHLQICPDAQLGLAEQLLLGVVDTAMMAQNALTAAESLGLGGVYIGGLRNNIEAVTELLKLPQHVLPLFGLCLGWPADNPDLKPRLPASILVHENSYQPLDKDALAQYDEQLAEYYLTRGSNNRRDTWSDHIRRTIIKESRPFILDYLHKQGWATR

SEQ ID NO: 788 - protein, 349 aa, Escherichia coli
MRTSFSQQQWIDMKVLVTGATSGLGRNAVEFLCQKGISVRATGRNEAMGKLLEKMGAEFVPADLTELVSSQAKVMLAGIDTLWHCSSFTSPWGTQQAFDLANVRATRRLGEWAVAWGVRNFIHISSPSLYFDYHHHRDIKEDFRPHRFANEFARSKAASEEVINMLSQANPQTRFTILRPQSLFGPHDKVFIPRLAHMMHHYGSILLPHGGSALVDMTYYENAVHAMWLASQEACDKLPSGRVYNITNGEHRTLRSIVQKLIDELNIDCRIRSVPYPMLDMIARSMERLGRKSAKEPPLTHYGVSKLNFDFTLDITRAQEELGYQPVLTLDEGIEKTAAWLRDHGKLPR

SEQ ID NO: 789 - protein, 398 aa, Escherichia coli
MPRFTYICINKIIVIIKLNIGNLYLINTIDIVTLFAWCSLLINCFSGGCGKNSTHLLIFKIYFYLDNQIFTPYWHKNHASYGPISQARYDLYQFLIYNALLVSRRRLNKERVSVKADNPFDLLLPAAMAKVAEEAGVYKATKHPLKTFYLAITAGVFISIAFVFYITATTGTGTMPFGMAKLVGGICFSLGLILCVVCGADLFTSTVLIVVAKASGRITWGQLAKNWLNVYFGNLVGALLFVLLMWLSGEYMTANGQWGLNVLQTADHKVHHTFIEAVCLGILANLMVCLAVWMSYSGRSLMDKAFIMVLPVAMFVASGFEHSIANMFMIPMGIVIRDFASPEFWTAVGSAPENFSHLTVMNFITDNLIPVTIGNIIGGGLLVGLTYWVIYLRENDHH

SEQ ID NO: 790 - protein, 400 aa, Escherichia coli
MRDNGAPADLLKTLGFLLNNLRAIDAQLATIESEQAQALPHNNDENELADDSPHGLSDIWLRLSRHFTPESALFRHAVRMSLVLCFGYAIIQITGMHHGYWILLTSLFVCQPNYNATRHRLKLRIIGTLVGIAIGIPVLWFVPSLEGQLVLLVITGVLFFAFRNVQYAHATMFITLLVLLCFNLLGEGFEVALPRVIDTLIGCAIAWAAVSYIWPDWKFRNLPRMLERATEANCRYLDAILEQYHQGRDNRLAYRIARRDAHNRDAELASVVSNMSSEPNVTPQIREAAFRLLCLNHTFTSYISALGAHREQLTNPDILAFLDDAVCYVDDALHHQPADEERVNQALAGLKQRMQQLEPRADSKEPLVVQQVGLLIALLPEIGRLQRQITQVPQETPVSA

SEQ ID NO: 791 - protein, 350 aa, Escherichia coli
MPVLHNRISNDALKAKMLAESEPRTTISFYKYFHIADPKATRDALYQLFTALDVFGRVYLAHEGINAQISVPASNVETFRAQLYAFDPALEGLRLNIALDDDGKSFWVLRMKVRDRIVADGIDDPHFDASNVGEYLQAAEVNAMLDDPDALFIDMRNHYEYEVGHFENALEIPADTFREQLPKAVEMMQAHKDKKIVMYCTGGIRCEKASAWMKHNGFNKVWHIEGGIIEYARKAREQGLPVRFIGKNFVFDERMGERISDEIIAHCHQCGAPCDSHTNCKNDGCHLLFIQCPVCAEKYKGCCSEICCEESALPPEEQRRRRAGRENGNKIFNKSRGRLNTTLGIPDPTE

SEQ ID NO: 792 - protein, 1061 aa, Escherichia coli
MKRMLINATQQEELRVALVDGQRLYDLDIESPGHEQKKANIYKGKITRIEPSLEAAFVDYGAERHGFLPLKEIAREYFPANYSAHGRPNIKDVLREGQEVIVQIDKEERGNKGAALTTFISLAGSYLVLMPNNPRAGGISRRIEGDDRTELKEALASLELPEGMGLIVRTAGVGKSAEALQWDLSFRLKHWEAIKKAAESRPAPFLIHQESNVIVRAFRDYLRQDIGEILIDNPKVLELARQHIAALGRPDFSSKIKLYTGEIPLFSHYQIESQIESAFQREVRLPSGGSIVIDSTEALTAIDINSARATRGGDIEETAFNTNLEAADEIARQLRLRDLGGLIVIDFIDMTPVRHQRAVENRLREAVRQDRARIQISHISRFGLLEMSRQRLSPSLGESSHHVCPRCSGTGTVRDNESLSLSILRLIEEEALKENTQEVHAIVPVPIASYLLNEKRSAVNAIETRQDGVRCVIVPNDQMETPHYHVLRVRKGEETPTLSYMLPKLHEEAMALPSEEEFAERKRPEQPALATFAMPDVPPAPTPAEPAAPVVAPAPKAAPATPAAPAQPGLLSRFFGALKALFSGGEETKPTEQPAPKAEAKPERQQDRRKPRQNNRRDRNERRDTRSERTEGSDNREENRRNRRQAQQQTAETRESRQQAEVTEKARTTDEQQAPRRERSRRRNDDKRQAQQEAKALNVEEQSVQETEQEERVRPVQPRRKQRQLNQKVRYEQSVAEEAVVAPVVEETVAAEPIVQEAPAPRTELVKVPLPVVAQAAPEQQEENNADNRDNGGMPRRSRRSPRHLRVSGQRRRRYRDERYPTQSPMPLTVACASPELASGKVWIRYPIVRPQDVQVEEQREQEEVQVQPMVTEVPVAAAVEPVVSAPVVEEVAEVVEAPVQVAEPQPEVVETTHPEVIAAAVTEQPQVITETDVAVAQEVAEHAEPVVEPQEETADIEEVAETAEVVVAEPEVVAQPAAPVVAEVAAEVETVAAVKPEVTVEHNHATAPMTRAPAPEYVPEAPRHSDWQRPTFAFEGKGAAGGHTATHHASAAPARPQPVE

SEQ ID NO: 793 - protein, 730 aa, Escherichia coli
VATGALAYAWYQGNSTLSDFNKTLVLSGNQAGLTADRILALSRAGQAAGLTFNQTSESLTALVNAGVRGGEQFEAISQSVARFSSASGVEVDKVAEAFGKLTTDPTSGLTAMARQFHNVTAEQIAYVAQLQRSGDEAGALQAANEAATKGFDDQTRRLKENMGTLETWADRTARAFKSMWDSVLDIGRPDTAQGMLEKAEKAFDEADKKWQWYQSRSHRRGKTSAFLANLRGAWEDRANAQLGLSAATLQADLEKAREMAAKDWAESEASRLKYTEEAQKAYERLQTPLEKYTARQEELNKALKDGKILQADYNTLMAAAKKDYEATLKKPKQSGVKVSAGDRQEDSAHAALLTLQAELRTLEKHAGANEKISQQRRDLWKAESQFAVLEEAAQRRQLSAQEKSLLAHKDETLEYKRQLAALGDKVTYQERLNALAQQADKFAQQQRAKRAAIEAKNRGLTDRQAAREATEQRLKEQYGDNSLALNNVMSEQKKTWAAEDQLRGSWMAGLRSGWSEWEESATDSMSQVKSAATQTFDGIAQNMAAMLTGSEQNWRSFTRSVLSMMTEILLKQAMVGIVGSIGSAIGGAVGGGASASGGTAIQAAAAKFHFATGGFTGTGGKYEPAGIVHRGEFVFTKEATSRIGVGNLYRLMRGYAEGGYVGGAGSPAQMRRAEGINFNQNNHVVIQNDGTNGLPGPQMMKAVYDMARKGARDEIQAQMRDGGLFSGGGR

SEQ ID NO: 794 - protein, 989 aa, Escherichia coli
VNMAVKISGVLKDGTGKPVQNCTIQLKAKRNSTTVVVNTLASENPDEAGRYSMDVEYGQYSVILLVEGFPPSHAGTITVYEDSRPGTLNDFLGAMTEDDARPEALRRFELMVEEVARNASAVAQNTAAAKKSASDASTSAREAATHATDAAGSARAASTSAGQAATSAQSASSSAGTASTKATEASKSAAAAESSKSAAATSASAAKTSETNAAASQQSAATSASAATTKASEAATSARDAAASKEAAKSSETSAASSASSAASSATAAGNSAKAAKTSETNAKSSETAAAQSASAAADSKTAAASSASAASTNAGQASASATAAGKSAESAASSASTATTKAGEAAVQASAAARSASAAKTSETNAKASETSAESSKTAAASSASSAASSALSASASKDEATRQASAAKGSATTASTKATEAAGSATAAAQSKSTAESAATRAETAAKRAEDIASAVALEDASTTKKGIVQLSSATNSTSESLAATPKAVKAAYELANGKYTAQDATTAQKGIVQLSNATNSTSEMLAATPKSVKAAYDLANGKYTAQNATTAQKGIVQLSSATNSASETLAATPKAVKAANDNANGRVPSARKVNGKALSADITLTPKDIGTLNSTTMSFSGGAGWFKLATVTMPQASSVVSITLIGGAGFNVGSPQQAGISELVLRAGNGNPKGITGALWQRTSTGFTNFAWVNTSGDTYDIYVAIGNYATGVNIQWDYTSNASVTIHTSPAYSANKPEGLTDGTVYSLYTPSEQFYPPGAPIPWPSDTVPSGYALMQGQTFDKSAYPKLAAAYPSGVIPDMRGWTIKGKPASGRAVLSQEQDGIKSHTHSASASSTDLGTKNTSSFDYGTKSTNNTGAHTHSISGTANSAGAHQHKSSGAFGGTNTSIFPNGYTAISNLSAGIMSTTSGSGQTRNAGKTSSDGAHTHSLSGTAASAGAHAHTVGIGAHTHSVAIGSHGHTITVNAAGNAENTVKNIAFNYIVRLA

SEQ ID NO: 795 - protein, 301 aa, Escherichia coli
MRKIKIGLALGSGAARGWSHIGVINALKKVGIEIDIVAGCSIGSLVGAAYACDRLSALEDWVTSFSYWDVLRLMDLSWQRGGLLRGERVFNQYREIMPETEIENCSRRFAAVATNLSTGRELWFTEGDLHLAIRASCSIPGLMAPVAHNGYWLVDGAVVNPIPISLTRALGADIVIAVDLQHDAHLMQQDLLSFNVSEENSENGDSLPWHARLKERLGSITTRRAVTAPTATEIMTTSIQVLENRLKRNRMAGDPPDILIQPVCPQISTLDFHRAHAAIAAGQLAVEKKMDELLPLVRTNI

SEQ ID NO: 796 - protein, 244 aa, Escherichia coli
MIMTSMTLDLPRRFPWPTLLSVCIHGAVVAGLLYTSVHQVIELPAPAQPISVTMVAPADLEPPQAVQPPPEPVVEAEPEPEPIPEPPKEAPVVIEKPKPKPKPKPKPVKKVQEQPKRDVKPVESRPASPFENTAPARPTSSTATAATSKPVTSVASGPRALSRNQPQYPARAQALRIEGQVKVKFDVTPDGHVDNVQILSAKPANMFEREVKNAMRRWRYEPGKPGSGIVVNILFKINGTTEIQ

SEQ ID NO: 797 - protein, 242 aa, Escherichia coli
MTVTRPRAERGAFPPGTEHYGRSLLGAPLIWFPAPAASRESGLILAGTHGDENSSVVTLSCALRTLTPSLRRHHVVLCVNPDGCQLGLRANANGVDLNRNFPAANWKEGETVYRWNSAAEERDVVLLTGDKPGSEPETQALCQLIHRIQPAWVVSFHDPLACIEDPRHSELGEWLAQAFELPLVTSVGYETPGSFGSWCADLNLHCITAEFPPISSDEASEKYIFAMANLLRWHPKDAIRPL

SEQ ID NO: 798 - protein, 546 aa, Escherichia coli
MNTTPSQRLGFLHHIRLVPLFACILGGILVLFALSSALAGYFLWQADRDQRDVTAEIEIRTGLANSSDFLRSARINMIQAGAASRIAEMEAMKRNIAQAESEIKQSQQGYRAYQNRSVKTPADEALDTELNQRFQAYITGMQPMLKYAKNGMFEAIINHESEQIRPLDNAYTDILSKAVKIRSTRANQLAELAHQRTRLGGMFMIGAFVLALVMTLITFMVLRRIVIRPLQHAAQRIEKIASGDLTMNDDPAGRNEIGRLSRHLQQMQHSLGMTVGTVRQGAEEIYRGTSEISAGNADLSSRTEEQAAAIEQTAASMEQLTATVKQNTDNAHHASKLAQEASIKASDGGQTVSGVVKTMGAISTSSKKISEITAVINSIAFQTNILALNAAVEAARAGEQGRGFAVVASEVRTLASRSAQAAKEIEGLISESVRLIDLGSDEVATAGKTMSTIVDAVASVTHIMQEIAAASDEQSRGITQVSQAISEMDKVTQQNASLVEEASAAAVSLEEQAARLTEAVDVFRLNKHSVSAEPRGAGEPVRFATV

SEQ ID NO: 799 - protein, 222 aa, Escherichia coli
MRTTSIAKVAALCGLLALSGCASKITQPDKYSGFLNNYSDLKETTSATGKPVLRWVDPSFDQSKYDSIVWNPVTYYPVPKPSTQVGQKVLDKILSYTNTEMKEAIAQRKPLVTTAGPRSLIFRGAITGVDTSKEGLQFYEVVPVALVVAGTQMATGHRTMDTRLYFEGELIDAATNKPVIKVVRQGEGKDLNNESTPMAFENIKQVIDDMATDATMFDVNKK

SEQ ID NO: 800 - protein, 178 aa, Escherichia coli
MENLARFLSTTLKQLRQQRGWSLSRLAEATGVSKAMLGQIERNESSPTVATLWKIATGLNVPFSTFISPPQSATPSVYDPQQQAMVITSLFPYDPQLCFEHFSIQMAPGAISESTPHEKGVIEHVVVIDGQLDLCVDGEWQSLNCGEGARFAADVTHVYRNGGEQIVHFHSLIHYPRS

SEQ ID NO: 801 - protein, 381 aa, Escherichia coli
MSKTFARSSLCALTMTIITAHAAEPPTNLDKPEGRLDIIAWPGYIERGQTDKQYDWVTQFEKETGCAVNVKTAATSDEMVSLMTKGGYDLVTASGDASLRLIMGKRVQPINTALIPNWKTLDPRVVKGDWFNVSGKVYGTPYQWGPNLLMYNTKTFPTPPDSWQVVFVEQNLPDGKSNKGRVQAYDGPIYIADAALFVKATQPQLGISDPYQLTEEQYQAVLKVLRDQHSLIHRYWHDTTVQMSDFKNEGVVASSAWPYQANALKAEGQPVATVFPKEGVTGWADTTMLHSEAKHPVCAYKWMNWSLTPKVQGDVAAWFGSLPVVPEGCKASPLLGEKGCETNGFNYFDKIAFWKTPIAEGGKFFPYSRWTQDYIAIMGGR

SEQ ID NO: 802 - protein, 474 aa, Escherichia coli
MQHKLLINGELVSGEGEKQPVYNPATGEVLLEIAEASAEQVDAAVRAADAAFAEWGQTTPKARAECLLKLADVIEENGQVFAELESRNCGKPLHSAFNDEIPAIVDVFRFFAGAARCLNGLAAGEYLEGHTSMIRRDPLGVVASIAPWNYPLMMAAWKLAPALAAGNCVVLKPSEITPLTALKLAELAKDIFPAGVINVLFGRGKTVGDPLTGHPKVRMVSLTGSIATGEHIISHTAPSIKLTHMELGGKAPVIVFDDADIEAVVEGVRTFGYYNAGQDCTAACRIYAQKGIYDTLVEKLGAAVATLKSGAPDDESTELGPLSSLAHLDRVSKAVEEAKATGHIKVITGGEKRKGNGYYYAPTLLAGALQDDAIVQKEVFGPVVSVTLFDNEEQVVNWANDSQYGLASSVWTKDVGRAHRVSARLQYGCTWVNTHFMLVSEMPHGGQKLSGYGKDMSLYGLEDYTVVRHVMVKH

SEQ ID NO: 803 - protein, 561 aa, Escherichia coli
VALSVSRANGGTSNYPRQRVTHYSLINSPVLYPLAHSTPVNQETVMKRSILFRPTLLAIVLATTMPVAHAAVPKDMLVIGKAADPQTLDPAVTIDNNDWTVTYPSYQRLVQYKTDGDKGSTDVEGDLASSWKASDDQKEWTFTLKDNAKFADGTPVTAEAVKLSFERLLKIGQGPAEAFPKDLKIDAPDEHTVRFTLSQPFAPFLYTLANDGASIINPAVLKEHAADDARGFLAQNTAGSGPFMLKSWQKGQQLVLVPNPHYPGNKPNFKRVSVKIIGESASRRLQLSRGDIDIADALPVDQLNALKQENKVNVAEYPSLRVTYLYLNNSKAPLNQADLRRAISWSTDYQGMVNGILSGNGKQMRGPIPEGMWGYDATAMQYNHDETKAKAEWDKVTSKPTSLTFLYSDNDPNWEPIALATQSSLNKLGINVKLEKLANATMRDRVGKGDYDIAIGNWSPDFADPYMFMNYWFESDKKGLPGNRSFYENSEVDKLLRNALATTDQTQRTRDYQQAQKIVIDDAAYVYLFQKNYQLAMNKEVKGFVFNPMLEQVFNINTMSK

SEQ ID NO: 804 - protein, 1538 aa, Escherichia coli
MADNLNPSSPLPDVFSPATRDWFLRAFKQPTAVQSQTWHVAARGEHALVIAPTGSGKTLAAFLYALDQLFREGGEDTREAHKRKTSRILYISPIKALGTDVQRNLQIPLQGIADERRRRGETEVNLRVGIRTGDTPAQERSKLTRNPPDILITTPESLYLMLTSRARETLRGVETVIIDEVHAVAGSKRGAHLALSLERLDALLHTSAQRIGLSATVRSASDVAAFLGGDRPVTVVNPPAMRHPQIRIVVPVANMDDVSSVASGTGEDSHAGREGSIWPYIETGILDEVLRHRSTIVFTNSRGLAEKLTARLNELYAARLQRSPSIAVDAVHFESTSGATSNRVQSSDIFIARSHHGSVSKEQRAITEQALKSGELRCVVATSSLELGIDMGAVDLVIQVATPLSVARGLQRIGRAGHQVGGISKGLFFPRTRRDLVDSAVIVECMFAGRLENLTPPHNPLDVLAQQTVAAASMDALQADEWYSRVRRAAPWKDLPRRVFDATLDMLSGRYPSGDFSAFRPKLVWNRETGILTARPGAQLLAVTSGGTIPDRGMYSVLLPEGEEQAGSRRVGELDEEMVYESRVNDIITLGATSWRIQQITRDQVIVTPAPGRSARLPFWRGEGNGRPAELGEMIGDFLHLLADGAFFSGTIPPWLAEENTIANIQGLIDEQRNATGIVPGSRHLVLERCRDEIGDWRIILHSPYGRRVHEPWALAIAGRIHALWGADASVVASDDGIVARIPDTDGKLPDAAIFLFEPEKLLQIVREAVGSSALFAARFRECAARALLMPGRTPGHRTPLWQQRLRASQLLEIAQGYPDFPVILETLRECLQDVYDLPALERLMRRLNGGEIQISDVTTTTPSPFAASLLFGYVAEFMYQSDAPLAERRASVLSLDSELLRNLLGQVDPGELLDPQVIRQVEEELQRLAPGRRAKGEEGLFDLLRELGPMTVEDLAQRHTGSSEEIASYLENLLAVKRIFPTMISGQERLACMDDAARLRDALGVRLPESLPEIYLHRVSYPLRDLFLRYLRAHALVTSEQLAHEFSLGIAIVEEQLQQLREQGLVMNLQQDIWVSDEVFRRLRLRSLQAAREATRPVAATTYARLLLERQGVLPATDGSPALFASTSPGVYEGVDGVMRVIEQLAGVGLPASLWESQILPARVRDYSPEMLDELLATGAVIWSGQKKLGEDDGLVALHLQEYAAESFTPAEADQANRSALQQAIIAVLADGGAWFAQQISQRIRDKIGESVDPSALQEALWALVWQGVITSDIWAPLRALTLSSSNARTSTRRSHRARRGRPVYAQPVSPLVSYNTPKLAGRWSLLQVEPLNDTERMLALAENMLDRYGIISRQAVIAENIPGGFPSMQTLCRSMEDSGRIMRGRFVEGLGGAQFAERLTIDRLRDLATQTTQTRHYTPVALSANDPANAWGNLLPWPAHPATLIPTRRAGALVVVSGGKLLLYLAQGGKKMLVWQEKEELLAPEVFHALTTALRREPRLRFTLTEVNDLPVRQTPMFTLLREAGFSSSPQGLDWG

SEQ ID NO: 805 - protein, 247 aa, Escherichia coli
MLSIKDLHVSVEDKAILRGLSLDVRPGEVHAIMGPNGSGKSTLSATLAGREDYEVTGGTVEFKGKDLLALSPEDRAGEGIFMAFQYPVEIPGVSNQFFLQTALNAVRSYRGQETLDRFDFQDLMEEKIALLKMPEDLLTRSVNVGFSGGEKKRNDILQMAVLEPELCILDESDSGLDIDALKVVADGVNSLRDGKRSFIIVTHYQRILDYIKPDYVHVLYQGRIVKSGDFTLVKQLEEQGYGWLTEQ

SEQ ID NO: 806 - protein, 767 aa, Escherichia coli
MTEFDLTRILTGSEGTLAFITEARLDITPLPKVRRLVNVKYDSFDSALRNAPFMVEARALSVETVDSKVLNLAREDIVWHSVSELITDVPDKEMLGLNIVEFAGDDEALIDERVNALCVRLDELIASQQAGVIGWQVCRDLAGVERIYAMRKKAVGLLGNAKGAAKPIPFAEDTCVPPEHLADYIAGFRALLDSHGLSYGMFGHVDAGVLHVRPALDMCDPQQEILMKQISDDVVALTAKYGGLLWGEHGKGFRAEYSPAFFGEELFAELRKVKAAFDPHNRLNPGKICPPEGLDAPMMKVDAVKRGTFDRQIPIAVRQQWRGAMECNGNGLCFNFDARSPMCPSMKITQNRIHSPKGRATLVREWLRLLADRGVDPLKLEQELPESGVSLRTLIARTRNSWHANKGEYDFSHEVKEAMSGCLACKACSTQCPIKIDVPEFRSRFLQLYHTRYLRPLRDHLVATVESYAPLMARAPKTFNFFINQPLVRKLSEKHIGMVDLPLLSVPSLQQQMVGHRSANMTLEQLEALNAEQKARTVLVVQDPFTSYYDAQVVADFVRLVEKLGFQPVLLPFSPNGKAQHIKGFLNRFAKTAKKTADFLNRVAKLGMPMVGVDPALVLCYRDEYKLALGEERGEFNVLLANEWLASALESQPVATVSGESWYFFGHCTEVTALPGAPAQWAAIFARFGAKLENVSVGCCGMAGTYGHEAKNHKNSLGIYELSWHQAMQRLPRNRCLATGYSCRSQVKRVEGTGVRHPVQALLEIIK

SEQ ID NO: 807 - protein, 447 aa, Escherichia coli
MDQTYSLESFLNHVQKRDPNQTEFAQAVREVMTTLWPFLEQNPKYRQMSLLERLVEPERVIQFRVVWVDDRNQVQVNRAWRVQFSSAIGPYKGGMRFHPSVNLSILKFLGFEQTFKNALTTLPMGGGKGGSDFDPKGKSEGEVMRFCQALMTELYRHLGADTDVPAGDIGVGGREVGFMAGMMKKLSNNTACVFTGKGLSFGGSLIRPEATGYGLVYFTEAMLKRHGMGFEGMRVSVSGSGNVAQYAIEKAMEFGARVITASDSSGTVVDESGFTKEKLARLIEIKASRDGRVADYAKEFGLVYLEGQQPWSVPVDIALPCATQNELDVDAAHQLIATGVKAVAEGANMPTTIEATELFQQAGVLFAPGKAANAGGVATSGLEMAQNAARLGWKAEKVDARLHHIMLDIHHACVEHGGEGEQTNYVQGANIAGFVKVADAMLAQGVI

SEQ ID NO: 808 - protein, 323 aa, Escherichia coli; identical to SEQ ID NO: 367

SEQ ID NO: 809 - protein, 554 aa, Escherichia coli
MAQVINTNSLSLITQNNINKNQSALSSSIERLSSGLRINSAKDDAAGQAIANRFTSNIKGLTQAARNANDGISVAQTTEGALSEINNNLQRIRELTVQATTGTNSDSDLDSIQDEIKSRLDEIDRVSGQTQFNGVNVLSKDGSMKIQVGANDGETITIDLKKIDSDTLNLAGFNVNGEGETANTAATLKDMVGLKLDNTGVTTAGVNRYIADKAVASSTDILNAVAGVDGSKVSTEADVGFGAAAPGTPVEYTYHKDTNTYTASASVDATQLAAFLNPEAGGTTAATVSIGNGTTAQEQKVIIAKDGSLTAADDGAALYLDDTGNLSKTNAGTDTQAKLSDLMANNANAKTVITTDKGTFTANTTKFDGVDISVDASTFANAVKNETYTATVGVTLPATYTVNNGTAASAYLVDGKVSKTPAEYFAQADGTITSGENAATSKAIYVSANGNLTTNTTSESEATTNPLAALDDAIASIDKFRSSLGAIQNRLDSAVTNLNNTTTNLSEAQSRIQDADYATEVSNMSKAQIIQQAGNSVLAKANQVPQQVLSLLQG

SEQ ID NO: 810 - protein, 222 aa, Escherichia coli
MCGRFAQSQTREDYLALLAEDIERDIPYDPEPIGRYNVAPGTKVLLLSERDEHLHLDPVFWGYAPGWWDKPPLINARVETAATSRMFKPLWQHGRAICFADGWFEWKKEGDKKQPYFIYRADGQPVFLAAIGSTPFERGDEAEGFLIVTAAADQGLVDIHDRRPLVLSPEAARKWMRQEIGGKEASEIATSGCVPANQFTWHPVSRAVGNVKNQGAELIQPI

SEQ ID NO: 811 - protein, 106 aa, Escherichia coli
MKMSAIQGIEGVISQLQTTAMSARAQESLPQPTISFAGQLHAALDRISDTQTAARTQAEKFTLGEPGVALNDVMTDMQKASVSMQMGIQVRNKLVAAYQEVMSMQV

SEQ ID NO: 812 - protein, 472 aa, Escherichia coli
MQENISVTDSYSTGNAAQAMLEKLLQIYDVKTLVAQLNGVGENHWSAAILKRALANDSAWHRLSEKEFAHLQTLLPKPPAHHPHYAFRFIDLFAGIGGIRRGFESIGGQCVFTSEWNKHAVRTYKANHYCDPATHHFNEDIRDITLSHKDGVSDEAAAEHIRQHIPEHDVLLAGFPCQPFSLAGVSKKNSLGRAHGFACDTQGTLFFDVVRIIDARRPAMFVLENVKNLKSHDKGKTFRIIMQTLDELGYDVADAEDNGSDDPKIIDGKHFLPQHRERIVLVGFRRDLNLKADFTLRDISECFPAQRVTLAQLLDPMVEAKYILTPVLWKYLYRYAKKHQARGNGFGYGMVYPNNPQSVTRTLSARYYKDGAEILIDRGWDMATGEKDFDDPLNQQHRPRRLTPRECARLMGFEAPGEAKFRIPVSDTQAYRQFGNSVVVPVFAAVAKLLEPKIKQAVALRQQEAQHGRRSR

SEQ ID NO: 813 - protein, 59 aa, Escherichia coli
RTPVTATLENGDSMQQTVNYVPNVTNAEITLAASKDPVIADNNDLTTLTAPSLIQRAMQ

SEQ ID NO: 814 - protein, 732 aa, Escherichia coli
VGAGIERRAGIRMTEKVKQHAAPVTGSDEIDIGRLVGTVIEARWWVIGITAVFALCAVVYTFFATPIYSADALVQIEQSSGNSLVQDIGSALANKPPASDAEIQLIRSRLVLGKTVDDLDLDIAVSKNTFPIFGAGWDRLMGRQNETVKVTTFNRPKEMADQVFTLNVLDDKNYTLSSDGGFSARGQAGQMLKKEGVTLMVEAIHARPGSEFTVTKYSTLGMINQLQNSLTVTENGKDAGVLSLTYTGEDREQIRDILNSIARNYQEQNIERKSAEASKSLAFLAQQLPEVRSRLDVAENKLNAFRQDKDSVDLPLEAKAVLDSMVNIDAQLNELTFKEAEISKLYTKVHPAYRTLLEKRQALEDEKAKLNGRVTAMPKTQQEIVRLTRDVESGQQVYMQLLNKEQELKITEASTVGDVRIVDPAITQPGVLKPKKGLIILGAIIFGLMLSIVGVLLRSLFNRGIESPQVLEEHGISVYASIPLSEWQKARDSVKTIKGVKRYKQSQLLAVGNPTDLAIEAIRSLRTSLHFAMMQAQNNVLMMTGVSPSIGKTFVCANLAAVISQTNKRVLLIDCDMRKGYTHELLGTNNVNGLSEILIGQGDITTAAKPTSIAKFDLIPRGQVPPNPSELLMSERFAELVNWASKNYDLVLIDTPPILAVTDAAIVGRHVGTTLMVARYAVNTLKEVETSLSRFEQNGIPVKGVILNSIFRRASAYQDYGYYEYEYKSDAK

SEQ ID NO: 815 - protein, 789 aa, Escherichia coli
MLMANYGFCTIFAASSGNRGRKIHMKWLCSVGIAVSLALQPALADDLFGNHPLTPEARDAFVTELLKKMTVDEKIGQLRLISVGPDNPKEAIREMIKDGQVGAIFNTVTRQDIRAMQDQVMELSRLKIPLFFAYDVLHGQRTVFPISLGLASSFNLDAVKTVGRVSAYEAADDGLNMTWAPMVDVSRDPRWGRASEGFGEDTYLTSTMGKTMVEAMQGKSPADRYSVMTSVKHFAAYGAVEGGKEYNTVDMSPQRLFNDYMPPYKAGLDAGSGAVMVALNSLNGTPATSDSWLLKDVLRDQWGFKGITVSDHGAIKELIKHGTAADPEDAVRVALKSGINMSMSDEYYSKYLPGLIKSGKVTMEELDDATRHVLNVKYDMGLFNDPYSHLGPKESDPVDTNAESRLHRKEAREVARESLVLLKNRLETLPLKKSATIAVVGPLADSKRDVMGSWSAAGVADQSVTVLTGIKNAVGENGKVLYAKGANVTSDKGIIDFLNQYEEAVKVDPRSPQEMIDEAVQTAKQSDVVVAVVGEAQGMAHEASSRTDITIPQSQRDLIAALKATGKPLVLVLMNGRPLALVKEDQQADAILETWFAGTEGGNAIADVLFGDYNPSGKLPMSFPRSVGQIPVYYSHLNTGRPYNADKPNKYTSRYFDEANGALYPFGYGLSYTTFTVSDVKLSAPTMKRDGKVTASVQVTNTGKREGATVVQMYLQDVTASMSRPVKQLKGFEKITLKPGETQTVSFPIDIEALKFWNQQMKYDAEPGKFNVFIGTDSARVKKGEFELL

SEQ ID NO: 816 - protein, 863 aa, Escherichia coli
MHQSGSVSLCRSAISVLVATALYSPIALASTVEYGETVDGVVLEKDIQLVYGTANNTKINPGGEQHIKEFGVSSNTEINGGYQYIEMNGTAEYSVLNDGYQIVQMGGAANQTTLNNGVLQVYGAANDTTIKGGRLIIEKDGITVFAAIEKGGLLEVKEGGLAFAVDQKAGGAIKTTTRAMEVFGTNRLGQFDIKDGIANNMLLENGGSLRVEENDFAYNTTVDSGGLLEVMDGGTATGVDKKAGGQLIVSTNALEVSGTNSKGQFSIKDGVSKNYELDDGSGLIVMEDTQAIDTILDEHATMQSLGKDTGTRVQANAVYDLGRSDQNGSITYSSKAISENMVINNGRANVWAGTMVNVSVRGNDGILEVMKPQINYAPAMLVGKVVVSEGASFRTHGAVDTSKADVSLENSAWTIIADNSTTNQNTRLNLANLAMSGANVIMMAEPVTRSSVTASAENFITLTTNTLSGNGNFYMRTDMANHQSDQLNVTGQATGDFKIFVTDTGASPAAGDSLTLVTTGGGDAAFTLGNAGGVVDIGTYEYTLLDNGNHSWSLAENRAQITPSTTDVLNMAAAQPLVFDAELDTVRERLGSVKGVNYDTAMWSSAINTRNNVTTDAGAGFEQTLTGLTLGIDSRFSREESSTIRGLFFGYSHSDIGFDRGGKGNIDSYTLGAYAGWEHQNGAYVDGVVKVDRFANTIHGKMSNGATAFGDYNSNGAGAHVESGFRWVDGLWSVRPYLAFTGFTTDGQDYTLSNGMRADVGNTRILRAEAGTAVSYHMDLQNGTTLEPWLKAAVRQEYADSNQVKVNDDGKFNNDVAGTSGVYQAGIRSSFTPTLSGHLSVSYGNGAGVESPWNTQAGVVWTF

SEQ ID NO: 817 - protein, 351 aa, Escherichia coli
MEISFTRVALLAAALFFVGCDQKPQPAKTHATEVIVLEGKTMGTFWRASIPGIDAKRSAELKEKIQTQLDADDQLLSTYKKDSALMRFNDSQSLSPWPVSEAMADIVTTSLRIGARTDGAMDITVGPLVNLWGFGPEQQPIQIPSQEQIDAMKAKTGLQHLTVINQSHQQYLQKDLPDLYVDLSTVGEGYAADHLARLMEQEGISRYLVSVGGALNSRGMNGAGQPWRVAIQKPTDKENAVQAVVDINGHGISTSGSYRNYYELDGKRLSHVIDPQTGRPIEHNLVSVTVIAPTALEADAWDTGLMVLGPEKAKEVVRREGLAVYMITKEGDNFKTWMSPQFKSFLISEKN

SEQ ID NO: 818 - protein, 1539 aa, Escherichia coli
MEGHPMDTQRFQSQFHWHLSFKFSGAIAACLSLSLVGTGLANADDSLPSSNYAPPAGGTFFLLADSSFSSSEEAKVRLEAPGRDYRRYQMEEYGGVDVRLYRIPDPMAFLRQQKNLHRIVVQPQYLGDGLNNTLTWLWDNWYGKSRRVMQRTFSSQSRQNVTQALPELQLGNAIIKPSRYVQNSQFSPLKKYPLVEQFRYPLWQAKPVEPQQGVKLEGASSNFISPQPGNIYIPLGKQEPGLYLVEAMVGGYRATTVVFVSDTVALSKVSGNELLVWTAGKKQGEAKPGSEILWTDGLGVMTRGVTDDSGTLQLQHISPERSYILGKDAEGGVFVSENFFYESEIYNTRLYIFTDRPLYRAGDRVDVKVMGREFHDPLHSSPIVSAPAKLSVLDANGSLLQTINVTLDARNGGQGSFRLPENAVAGGYELRLAYRKQVYSSSFRVANYIKPHFEIGLALDKKDFKTGEAVSGKLQLLYPDGEPVKDASVQLSLRAQQLSMVGNDLRYAGRFPVSLEGSDAVSDDKGNVALNLPAADKPSRYLLTVSASDGAAYRVTTTKEILIERGLAHYSLSTSAQYSNSGESVVFRYAALESSKQVPVKYEWLRLEDRTSYSGDLPSGGKSFTVNFDKPGNYNLTLRDKDGLILAGLSHAVSGKGSMAHAGTVDIVANKTLYQPGETAKMLITFPEPIDEALLTLERDRVEQQSLLSHPANWLTLQRLNDTQYEARIPVSNSFAPNITFSVLYTRNGQYSFQNAGIKVAVSQLDIRVKTDKTHYQPGELVNVELTSSLKGKPVSAQLTVGVVDEMIYALQPEIAPNIGKFFYPLGRNNVRTSSSLSFISYDQALSSEPVAPGATNRSERRVKMLERPRREEVDTAAWMPSLTTDKQGKAYFTFLMPDSLTRWRITARGMSGDGLVGQGSAYLRSEKNLYMKWSMPTVYRMGDKPAAGLFIFSQQDNEPVALVTKFAGAEMRQTLTLHKGANYISLTQNIQQSGLLSAELQQNGQVQDSISTKLSFVDNSWPVEQQKNVMLAGGDNALMLPEQASNIRLQSSETPQEIFRNNLDALVDEPWGGVINTGSRLIPLSLAWRSLADHQSAAANDIRQMIQDNRLRLMQLAGPGARFTWWGEDGNGDAFLTAWAWYADWQASQALGVTQQPDYWQHMLDSYAEQADNMPLLHRALVLAWAQEMNLPCKTLLKGLDEAIARRGTKTEDFSEEDTSDINDSLILDTPESPLADAVANVLTMTLLKKAQLKSTVMPQVQQYAWDKAANSNQPLAHTVVLLNSGGDATQAAAILSGLTAEQSTIERALAMNWLAKYMATMPPVVLPAPAGAWAKHKLTGGGEYWRWVGQGVPDILSFGDELSPQNVQVRWREPAKTAQQSNIPVTVERQLYRLIPGEEELSFTLQPVTSNEIDSDALYLDEITLTSEQDAVLRYGQVEVPLPPGADVERTTWGISVNKPNAAKQQGQLLEKARNEMGELAYMVLVKELTGTVTFRHLLRFSQKGQFVLPPARYVRSYAPAQQSVAAGSEWTGMQVK

SEQ ID NO: 819 - protein, 875 aa, Escherichia coli; identical to SEQ ID NO: 380

SEQ ID NO: 820 - protein, 542 aa, Escherichia coli
MKTRDSQSSDVIIIGGGATGAGIARDCALRGLRVILVERHDIATGATGRNHGLLHSGARYAVTDSESARECISENQILKRIARHCVEPTNGLFITLPEDDLSFQATFIRACEEAGISAEAIDPQQARIIEPAVNPALIGAVKVPDGTVDPFRLTAANMLDAKEHGAVILTAHEVTGLIREGATVCGVRVRNHLTGETQALHAPVVVNAAGIWGQHIAEYADLRIRMFPAKGSLLIMDHRINQHVINRCRKPSDADILVPGDTISLIGTTSLRIDYNEIDDNRVTAEEVDILLREGEKLAPVMAKTRILRAYSGVRPLVASDDDPSGRNVSRGIVLLDHAERDGLDGFITITGGKLMTYRLMAEWATDAVCRKLGNTRPCTTADTPLPGSQEPAEVTLRKVISLPAPLRGSAVYRHGDRTPAWLSEGRLHRSLVCECEAVTAGEVQYAVENLNVNSLLDLRRRTRVGMGTCQGELCACRAAGLLQRFNVTTSAQSIEQLSTFLNERWKGVQPIAWGDALRESEFTRWVYQGLCGLEKEQKDAL

SEQ ID NO: 821 - protein, 402 aa, Escherichia coli
MLKVEMLSTGDEVLHGQIVDTNAAWLADFFFHQGLPLSRRNTVGDNLDDLVTILRERSQHADVLIVNGGLGPTSDDLSALAAATAKGEGLVLHEAWLKEMERYFHERGRVMTPSNRKQAELPASAEFINNPVGTACGFAVQLNRCLMFFTPGVPSEFKVMVEHEILPRLRERFSLPQPPVCLRLTTFGRSESDLAQSLDTLQLPPGVTMGYRSSMPIIELKLTGPASEKQAMEKLWLDVKRVAGQSVIFEGTEGLPSQISRELQNRQFSLTLSEQFTGGLLALQLSRAGAPLLACEVVPSQEETLAQTAHWITERRANHFAGLALAVSGFENEHLNFALATPDGTFALRVRFSTTRYSLAIRQEVCAMMALNMLRRWLNGQDIASEHGWIEVVESMTLSSAL

SEQ ID NO: 822 - protein, 331 aa, Escherichia coli
MIQPISGPPPGQPPGQGDNLPSGAGNQPLSSQQRTSLESLMTKVTSLTQQQRAELWAGIRHDIGLSGDSPLLSRHFPAAEHNLAQRLLAAQKSHSARQLLAQLGEYLRLGNNRQAVTDYIRHNFGQTPLNQLSPEQLKTILTLLQEGRMVIPQPQQREATDRPLLPAEHNALKQLVTKLAAATGEPSKQIWQSMLELSGVKDGELIPAKLFNHLVTWLQARQTLSQQNTPTLESLQMALKQPLDASELAALSAYIQQKYGLSAQSSLSSAQAEDILNQLYQRRVKGIDPRDMQPLLNPFPPMMDTLQNMATRPALWILLVAIILMLVWLVR

SEQ ID NO: 823 - protein, 362 aa, Escherichia coli
VMAGNTIGQLFRVTTFGESHGLALGCIVDGVPPGIPLTEADLQHDLDRRRPGTSRYTTQRREPDQVKILSGVFEGVTTGTSIGLLIENTDQRSQDYSAIKDVFRPGHADYTYEQKYGLRDYRGGGRSSARETAMRVAAGAIAKKYLAEKFGIEIRGCLTQMGDIPLEIKDWSQVEQNPFFCPDPDKIDALDELMRALKKEGDSIGAKVTVVASGVPAGLGEPVFDRLDADIAHALMSINAVKGVEIGDGFDVVALRGSQNRDEITKDGFQSNHAGGILGGISSGQQIIAHMALKPTSSITVPGRTINRFGEEVEMITKGRHDPCVGIRAVPIAEAMLAIVLMDHLLRQRAQNADVKTDIPRW

SEQ ID NO: 824 - protein, 436 aa, Escherichia coli
MGQVLPLVTRQGDRIAIVSGLRTPFARQATAFHGIPAVDLGKMVVGELLARSEIPAEVIEQLVFGQVVQMPEAPNIAREIVLGTGMNVHTDAYSVSRACATSFQAIANVAESLMAGTIRAGIAGGADSSSVLPIGVSKKLARVLVDVNKARTMSQRLKLFSRLRLRDLMPVPPAVAEYSTGLRMGDTAEQMAKTYGITREQQDALAHRSHQRAAQAWSDGKLKEEVMTAFIPPYKQPLVEDNNIRGNSSLADYAKLHPAFDRKHGTVTAANSTPLTDGAAAVILMTESRAKELGLVPLGYLRSYAFTAIDVWQDMLLGPAWSTPLALERAGLTMSDLTLIDMHEAFAAQTLANIQLLGSERFARDVLGRAHATGEVDDSKFNVLGGSIAYGHPFAATGARMITQTLHELRRRGGGFGLVTACAAGGLGAAMVVEAE

SEQ ID NO: 825 - protein, 233 aa, Escherichia coli
VKKLITANDIREAHARGEQAMSVVLRASIITPEAREVADLLGFTITECDESTAVTTSVPASVPADKTESQRIRETIIAQLPEGQFTESLVAQLMEKVMKEKLSLEQGAMQPSFKSVTGKGGIKVIDGSSVKFGRFDGAEPHCVGLTDLVTGDDGSSMAAGFMQWENAFFPWTLNYDEIDMVLEGELHVRHEGETMIAKAGDVMFIPKGSSIEFGTTSSVKFLYVAWPANWQSL

SEQ ID NO: 826 - protein, 659 aa, Escherichia coli
MNRFIMANSQQCLGCHACEIACVMAHNDEQHVLSQHHFHPRITVIKHQQQRSAVTCHHCEDAPCARSCPNGAISHVDDSIQVNQQKCIGCKSCVVACPFGTMQIVLTPVAAGKVKATAHKCDLCAGRENGPACVENCPADALQLVTDAALSGMAKSRRLRTARQEHQPWHASTAAQEMPVMSKVEQMQATPARGEPDKLAIEARKTGFDEIYLPFRADQAQREASRCLKCGEHSVCEWTCPLHNHIPQWIELVKAGNIDAAVELSHQTNTLPEITGRVCPQDRLCEGACTIRDEHGAVTIGNIERYISDQALAKGWRPDLSHVTKVDKRVAIIGAGPAGLACADVLTRNGMAVTVYDRHPEIGGLLTFGIPSFKLDKSLLARRREIFSAMGIHFELNCEVGKDVSLDSLLEQYDAVFVGVGTYRSMKAGLPNEDAPGVYDALPFLIANTKQVMGLEELPEEPFINTAGLNVVVLGGGDTAMDCVRTALRHGASNVTCAYRRDEANMPGSKKEVKNAREEGANFEFNVQPVALELNEQGHVCGIRFLRTRLGEPDAQGRRRPVPVEGSEFVMPADAVIMAFGFNPHGMPWLESHGVTVDKWGRIIADVESQYRYQTTNPKIFAGGDAVRGADLVVTAMAEGRHAAQGIIDWLGVKSVKSH

SEQ ID NO: 827 - protein, 1653 aa, Escherichia coli
MKKLRVAACMLMLALAGCDNNDNAPTAVKKDAPSEVTKAASSENVSSAKLSAPERQKLAQQSAGKALTLLDLSEVQLDGAATLVLTFSIPLDPDQDFSRVIHVVDKKIGKVDGAWELSDNLKELRLRHLEPKRDLIVTIGKEVKALNNATFSKDYEKTITTRDIQPSVGFASRGSLLPGKVVEGLPVMALNVNNVDVNFFRVKPESLPAFISQWEYRNSLANWQSDKLLQMADLVYTGRFDLNPARNTREKLLLPLGDIKPLQQAGVYLAVMNQAGRYDYSNPATLFTLSDIGVSAHRYHNRLDIFTQSLENGAAQQGIEVSLLNEKGQTLTQATSDAQGHVQLENDKNAALLLARKDGQTTLLDLKLPALDLAEFNIAGAPGYSKQFFMFGPRDLYRPGETVILNGLLRDADGKALPNQPIKLDVIKPDGQVLRSVVSQPENGLYHFTWPLDSNAATGMWHIRANTGDNQYRMWDFHVEDFMPERMALNLTGEKTPLTPKDEVKFSVVGYYLYGAPANGNTLQGQLFLRPLREAVSALPGFEFGDIAAENLSRTLDEVQLTLDDKGRGEVSTESQWKETHSPLQVIFQGSLLESGGRPVTRRAEQAIWPADALPGIRPQFASKSVYDYRTDSTVKQPIVDEGSNAAFDIVYSDAQGVKKAVSGLQVRLIRERRDYYWNWSEDEGWQSQFDQKDLIENEQTLDLKADETGKVSFPVEWGAYRLEVKAPNEAVSSVRFWAGYSWQDNSDGSGAVRPDRVTLKLDKASYRPGDTIKLHIAAPTAGKGYAMVESSEGPLWWQEIDVRAQGLDLTIPVDKTWNRHDLYLSTLVVRPGDKSRSATPKRAVGVLHLPLGDENRRLDLALETPAKMRPNQPLTVKIKASTKNGEKPKQVNVLVSAVDSGVLNITDYVTPDPWQAFFGQKRYGADIYDIYGQVIEGQGRLAALRFGGDGDELKRGGKPPVNHVNIVAQQALPVTLNEQGEGSVTLPIGDFNGELRVMAQAWTADDFGSNERKVIVAAPVIAELNMPRFMASGDTSRLTLDITNLTDKPQKLNVALTASGLLELVSDSPAAVELAPGVRTTLFIPVRALQGYGDGEIQASISGLALPGETVADQHKQWKIGVRPAFPAQTVNYGTALQPGETWALPADGLQNFSPVTLQGQLLLSGKPPLNIARYIKELKAYPYGCLEQTASGLFPSLYTNAAQLQSLGIKGDSDEKRRASVDIGISRLLQMQRDNGGFALWDKNGDEEYWLTAYVMDFLVRAGEQGYSVPTDAINRGNERLLRYLQDPGMMSIPYADNLKASKFAVQSYAALVLARQQKAPLGALREIWEHRADAASGLPLLQLGVALKTMGDATRGEEAIALALKTPRNSDERIWLGDYGSPLRDNALMLSLLEENKLLPDEQNTLLNTLSQQAFGERWLSTQESNALFLAARTVQDLPGKWQAQTSFSAEPLTGEKAQNSNLNSDQLATLQVTNSGDQPLWLRVDASGYPQSAPLPANNVLQIERHILGTDGKSKSLDSLRSGDLVLVWLQVKASNSVPDALVVDLLPAGLELENQNLANGSASLEQSGGEVQNLLNQMQQASIKHIEFRDDRFVAAVAVDEYQPVTLVYLARAVTPGTYQVPQPMVESMYVPQWRATGAAEDLLIVRP

SEQ ID NO: 828 - protein, 327 aa, Escherichia coli
MPKKMTTTRNLLLMATLLGSALFARAADKEMTIGAIYLDTQGYYAGVRQGVQDAAKDSSVQVQLIETNAQGDISKESTFVDTLVARNVDAIILSAVSENGSSRTVRRASEAGIPVICYNTCINQKGVDKYVSAYLVGDPLEFGKKLGNAAADYFIANKIDQPKIAVINCEAFEVCVQRRKGFEEVLKSRVPGAQIVANQEGTVLDKAISVGEKLIISTPDLNAIMGESGGATLGAVKAVRNQNQAGKIAVFGSDMTTEIAQELENNQVLKAVVDISGKKMGNAVFAQTLKVINKQADGEKVIQVPIDLYTKTEDGKQWLATHVDGLP

SEQ ID NO: 829 - protein, 840 aa, Escherichia coli
MAEKSQYDFVGAWCHDEDGGLLHVANHHIAPGKKQWSWGHSEFGQAWDKSLTDNNGPYIELMTGIFADNQPDFTWLDAYEEKRFEQYFLPYHSLGMVQNASRDAVIKLQRSERGIEWGLYAISPLNGYRLAIREIGKCNALLDDAVALMPATAIQGVLHGINPDRLTIELSDADGNIILSYQEHQPQELPLPDVAKAPLAAQDITSTDEAWFIGQHLEQYHHASRSPFDYYLRGVALDPLDYRCNLALAMLEYNRADFPQAVAYATQALKRAHALNKNPQCGQASLIRASAYERQGQYQQAEEDFWRAVWSGNSKAGGYYGLARLAARNGNFDAGLDFCQQSLRACPTNQEVLCLHNLLLVLSGRQGNARLQREKLLRDYPLNATLWWLNWFDGRSESAFAQWRGLCQGRDVNALVTAGQLINWGMPTLAAEMLNALDCQRTLPLYLQASLLPKAERGELVAKAIDVFPQFVRFPNTLEEVAALESIEECWFARHLLACFYYNKRSYNKAITLWQRCVEMSPEFADGWRGLAIHAWNKQHDYELAARYLDNAYQLAPQDARLLFERDLLDKLSGTTPEKRLARLENNLEIALKRDDMTAELLNLWHLTGQADKAADILATRKFHPWEGGEGKITSQFILNQLLRAWQHLDAREPQQASELLHAALHYPENLSEGRLPGQTDNDIWFWQAICANAQGDQTEAMRCLRLAATGDRTINIHSYYNDQPVDYLFWQGMALRLLGEQQTAQQLFSEMKQWAQEMAKTSIEADFFAVSQPDLLSLYGDLQQQHKEKCLMVAMLASAGLGEAAHYESARAELTAINPAWPKAALFTTVMPFIFNRVH

SEQ ID NO: 830 - protein, 1567 aa, Escherichia coli
VNTIHLRCLFRMNPLVWCLWADVAAKLRSLKRYSVFTFQRMKFMNRTSPYYFRRSVLSLLISALIYAQPGMAAFTTNVIGVVNDETVDGNQRVDERGTTNNTHIINHGRQEVYGGISNSSIIETGGEQLVSIHADINGQANNTTINGGRQSIEYGGISTGTIIESGNQYVYKGGTSNDTTIKGGTSRIEGGTANGTIIDGGGQSVSTQGHVDGTTINKSGYQDITQGSLATNTTINGGRQYVEQSTVETTTIKNGGEQRVYESRALDTTIEGGTQSLNSKSTAKNTQIYSGGTQIVDYTSTSDVIEVYSGGVLDVSGGTATNVTQHDGAILKTNTNGTTVSGTNSEGAFSIHNTVAENVLLENGGHLDINAYGSANKTIIKDKGTMSVLTNAKADATRIDNGGVMDVAGKATNTIINGGTQNINNYGIATGTNINSGTQNIKSGGKADTTNISSGSRQVVEKDGTATGSNISAGGSLIVYTGGIAHGVNQETGSALVANTGAGTDIEGYNKLSHFTITGGEANYVVLENTGELTVMAKTSAKNTTVDAGGKLIVQKEAKTDTIRLNNGGVLEVQDGGEAKHVEQQSGGALIASTTSGTLIEGTNSYGDVFYIRNSEAKNVVLENAGSLTVVTGSRAVDTIINANGKMDVYGKDVGTVLNSAGTQTIYASATSEKANIKGGKQTVYGLATDANIESGEQIVDGGSTDKTHINGGTQTVQNYGKAINTDIVSGLQQIMVNGTAEGSIINGGSQVVNEGGLAENSVLNEGGTLDVREKGSATGIQQSSQGALVATTRATRVTGTRADGVAFSIEQDAANNILLANGGVLTVESDTTSAKTQVNAGGREIVKTKATATGTTLTGGEQIVEGVANETTINDGGIQTVSANGEAVKTTINEGGTLTVNDNGKATDIIQNSGAALQTSTANGIEISGTHQYGTFSIAGNLATNVLLENGGNLLVLAGTEARDSTVGNGGAMQNLGQDFATKVNSGGQYTLGRSKDEFQALARAEDLLIAGGTAIVYAGTLADASVSGATGSLSLMTPRDNVTPVKLEGVVRITDSATLTIGNGVDTTLADLTAASRGSVWLNSNNSCAGTSNCEYRVNSLLLNDGDVYLSAQTAAPATTNGIYNTLTTSELSGSGNFYLHTNVAGSRGDQLVVNNNATGNFKIFVQDTGVSPQSDDAMTLVKTGGGDASFTLGNTGGFVDLGTYEYVLKSDGNSNWNLTNDVKPNPDPNPNPKPDPKPDPKPDPKPDPTPDPTPTPVPEKRITPSTAAVLNMAATLPLVFDAELNSIRERLNIMKASPHNNNVWGATYNTRNNVTTDAGAGFEQTLTGMTVGIDSRNDIPEGIATLGAFMGYSHSHIGFDRGGHGSVGSYSLGGYASWEHESGFYLDGIVKLNRFESNVAGKMSSGGAANGSYRSNGLGGHIETGMRFTDGNWNLTPYASLTGFTADNPEYHLSNGMESKSVDTRSIYRELGATLSYNMRLGNGMEVEPWLKAAVRKEFVDDNRVKVNNDGNFVNDLSGRRGIYQAGIKASFSSSLSGHLGVGYSHGAGVESPWNAVAGVNWSF

SEQ ID NO: 831 - protein, 208 aa, Escherichia coli; identical to SEQ ID NO: 397

SEQ ID NO: 832 - protein, 550 aa, Escherichia coli
VVIYAFNKRLMEYFMKGKSALTLLLAGIFSCCTCQAIGAEVTSDSVFNILNSRGEAIDKSYLSLNPDKYPNYRLLIHSAKLQNEIKSHYTKDEIQGLLTLTENTRKLALTEKPWGTFILASTFEDDKTAAETHYDAVWLRDSLWGYMALVSDQENRVAAKKILLTLWDYISTPDQIKRMQDVISNPKRLDGIPGQMNAVHIRFDSNSPVMADVQEEGKPQLWNHKQNDALGLYLDLLIQAIDTGTINAEDWEKGDRLKSIALLVAYLDKSNFYIMEDSGAWEEDARLNTSSVALVTSGLERLSNLLSKKDSVFISDLLREAKANELDETFSTTRLNHLIDKGYERITLQLDLGGESPGYLEKDKHYREADAALLNVIYPANLSKINTRRKEQVLKIVKKLAGPYGIKRYEKDNYQSANFWFNDIKTDTDENSHAKREMSFIPSTEAEWFFDSWYAKSAAIVYKESRKEEYLNDSVQFMNRSLAQITGENMIGANGRSVPEMALPESYNYIHKSGTLHEAPSPIIPLNWSKASMTLMLKEMSNLINDEGIK

SEQ ID NO: 833 - protein, 403 aa, Escherichia coli; identical to SEQ ID NO: 399

SEQ ID NO: 834 - protein, 294 aa, Escherichia coli
MLACCAIYSPVRCAFPYTETERRFTCKRRIFRIILTLCGRENMKIRALLVAMSVATVLTGCQNMDSNGLLSSGAEAFQAYSLSDAQVKTLSDQACQEMDSKATIAPANSEYAKRLTTIANALGNNINGQPVNYKVYMAKDVNAFAMANGCIRVYSGLMDMMTDNEVEAVIGHEMGHVALGHVKKGMQVALGTNAVRVAAASAGGIVGSLSQSQLGNLGEKLVNSQFSQRQEAEADDYSYDLLRQRGISPAGLATSFEKLAKLEEGRQSSMFDDHPASAERAQHIRDRMSADGIK

SEQ ID NO: 835 - protein, 236 aa, Escherichia coli
VMYRYLSIAAVVLSAAFSGPALAEGINSFSQAKAAAVKVHADAPGTFYCGCKINWQGKKGVVDLQSCGYQVRKNENRASRVEWEHVVPAWQFGHQRQCWQDGGRKNCAKDPVYRKMESDMHNLQPSVGEVNGDRGNFMYSQWNGGEGQYGQCAMKVDFKEKAAEPPARARGAIARTYFYMRDQYNLTLSRQQTQLFNAWNKMYPVTDWECERDERIAKVQGNHNPYVQRACQARKS

SEQ ID NO: 836 - protein, 211 aa, Escherichia coli
VTAPFFPRILGAVAFLNQETEPLTMNLLHHFLIAMPALQDPIFRRSVVYICEHNTNGAMGIIVNKPLENLKIEGILEKLKITPEPRDESIRLDKPVMLGGPLAEDRGFILHTPPSNFASSIRISDNTVMTTSRDVLETLGTDKQPSDVLVALGYASWEKGQLEQEILDNAWLTAPADLNILFKTPIADRWREAAKLIGVDILTMPGVAGHA

SEQ ID NO: 837 - protein, 341 aa, Escherichia coli
VPGYAQYRSFSEDLSMNMEEIVALSVKHNVSDLHLCSAWPARWRIRGRMEAAPFDTPDVEELLREWLDDDQRAILLENGQLDFAVSLAENQRLRGSAFAQRHGISLALRLLPSHCPQLEQLGAPTVLPELLKSENGLILVTGATGSGKSTTLAAMVGYLNQHADAHILTLEDPVEYLYASQRCLIQQREIGLHCMTFASGLRAALREDPDVILLGELRDSETIRLALTAAETGHLVLATLHTRGAAQAVERLVDSFPAQEKDPVRNQLAGSLRAVLSQKLEVDKQEGRVALFELLINTPAVGNLIREGKTHQLPHVIQTGQQVGMITFQQSYQHRVGEGRL

SEQ ID NO: 838 - protein, 420 aa, Escherichia coli
MALTDAKIRAAKPTDKAYKLTDGAGMFLLVHPNGSRYWRLRYRILGKEKTLALGVYPEVSLSEARTKRDEARKLISEGIDPCEQKRVKKVVPDLQLSFEHIARRWHASNKQWAQSHSDKVLKSLETHVFPFIGNRDITTLNTPDLLIPVRAAEAKQIYEIASRLQQRISAVMRYAVQSGIIRYNPALDMAGALTTVKRQHRPALNLSRLPELLSRIDGYKGQPVTRLAVMLNLLVFIRSSELRYARWSEIDIDNAMWTIPAEREPLPGVKFSHRGSKMRTPHLVPLSKQAVAILTELQTWAGENGLIFTGAHDPRKPISENTVNKALRVMGYDTTQEVCGHGFRAMACSALIESGLWSRDAVERQMSHQERNGVRAAYIHKAEHLEERRLMLQWWADFLDANREKFISPFEYAKINNPLK

SEQ ID NO: 839 - protein, 495 aa, Escherichia coli
MQMKKLLPILIGLSLSGFSSLSQAENLMQVYQQARLSNPELRKSAADRDAAFEKINEARSPLLPQLGLGADYTYSNGYRDANGINSNATSASLQLTQSIFDMSKWRALTLQEKAAGIQDVTYQTDQQTLILNTATAYFNVLNAIDVLSYTQAQKEAIYRQLDQTTQRFNVGLVAITDVQNARAQYDTVLANEVTARNNLDNAVEQLRQITGNYYPELAALNVENFKTDKPQPVNTLLKEAEKRNLSLLQARLSQDLAREQIRQAQDGHLPTLDLTASTGISDTSYSGSKTRGAAGTQYDDSNMGQNKVGLSFSLPIYQGGMVNSQVKQAQYNFVGASEQLESAHRSVVQTVRSSFNNINASISSINAYKQAVVSAQSSLDAMEAGYSVGTRTIVDVLDATTTLYNAKQELANARYNYLINQLNIKSALGTLNEQDLLALNNALSKPVSTNPENVAPQTPEQNAIADGYAPDSPAPVVQQTSARTTTSNGHNPFRN

SEQ ID NO: 840 - protein, 168 aa, Escherichia coli
MVEDILAPGLRVVFCGINPGLSSAGTGFPFAHPANRFWKVIYQAGFTDRQLKPQEAQHLLDYRCGVTKLVDRPTVQANEVSKQELHAGGRKLIEKIEDYQPQALAILGKQAYEQGFSQRGAQWGKQTLTIGSTQIWVLPNPSGLSRVSLEKLVEAYRELDQALVVRGR

SEQ ID NO: 841 - protein, 167 aa, Escherichia coli; identical to SEQ ID NO: 410

SEQ ID NO: 842 - protein, 890 aa, Escherichia coli; identical to SEQ ID NO: 412

SEQ ID NO: 843 - protein, 185 aa, Escherichia coli; identical to SEQ ID NO: 415

SEQ ID NO: 844 - protein, 1001 aa, Escherichia coli
MGDDTPFAVLSSQPRIIYDYFRQQFAQVTNPPIDPLREAHVMSLATSIGREMNVFCEAEGQAHRLSFKSPILLYSDFKQLTTMKEEHYRADTLDITFDVTKTTLEATVKELCDKAEKMVRSGTVLLVLSDRNIAKDRLPVPAPMAVGAIQTRLVDQSLRCDANIIVETASARDPHHFAVLLGFGATAIYPYLAYETLGRLVDTHAIAKDYRTVMLNYRNGINKGLYKIMSKMGISTIASYRCSKLFEAVGLHDDVVGLCFQGAVSRIGGASFEDFQQDLLNLSKRAWLARKPISQGGLLKYVHGGEYHAYNPDVVRTLQQAVQSGEYSDYQEYAKLVNERPATTLRDLLAITPGENAVNIADVEPASELFKRFDTAAMSIGALSPEAHEALAEAMNSIGGNSNSGEGGEDPARYGTNKVSRIKQVASGRFGVTPAYLVNADVIQIKVAQGAKPGEGGQLPGDKVTPYIAKLRYSVPGVTLISPPPHHDIYSIEDLAQLIFDLKQVNPKAMISVKLVSEPGVGTIATGVAKAYADLITIAGYDGGTGASPLSSVKYAGCPWELGLVETQQALVANGLRHKIRLQVDGGLKTGVDIIKAAILGAESFGFGTGPMVALGCKYLRICHLNNCATGVATQDDKLRKNHYHGLPFKVTNYFEFIARETRELMAQLGVTRLVDLIGRTDLLKELDGFTAKQQKLALSKLLETAEPHAGKALYCTENNPPFDNGLLNAQLLQQAKPFVDERQSKTFWFDIRNTDRSVGASLSGYIAQTHGDQGLAADPIKAYFNGTAGQSFGVWNAGGVELYLTGDANDYVGKGMAGGLIAIRPPVGSAFRSHEASIIGNTCLYGATGGRLYAAGRAGERFGVRNSGAITVVEGIGDNGCEYMTGGIVCILGKTGVNFGAGMTGGFAYVLDESGDFRKRVNPELVEVLSVDDLAIHEEHLRGLITEHVQHTGSQRGEEILANWSTFATKFALVKPKSSDVKALLGHRSRSAAELRVQAQ

SEQ ID NO: 845 - protein, 281 aa, Escherichia coli
VNCFDRGNIMETYAVFGNPIAHSKSPFIHQQFAQQLNIEHPYGRVLAPINDFINTLNAFFSAGGKGANVTVPFKEEAFARADELTERAALAGAVNTLKRLEDGRLLGDNTDGIGLLSDLERLSFIRPGLRILLIGAGGASRGVLLPLLSLDCAVTITNRTVSRAEELTKLFAHTGSIQALGMDKLEGHEFDLIINATSSGISGDIPAIPSSLIHPGIYCYDMFYQKGKTPFLAWCEQRGSKRNADGLGMLVAQAAHAFLLWHGVLPDVEPVIKLLQQELSA

SEQ ID NO: 846 - protein, 104 aa, Escherichia coli [sequence omitted]

SEQ ID NO: 847 - protein, 412 aa, Escherichia coli
MKQWIAALLLMLIPGVQAAKPQKVTLMVDDVPVAQVLQALAEQEKLNLVVSPDVSGTVSLHLTDVPWKQALQTVVKSAGLITRQEGNILSVHSVAWQNDNIARQEAEQARAQANLPLENRNITLQYADAGELAKAGEKLLSAKGSMTVDKRTNRLLLRDNKTALSALEQWVAQMDLPVGQVELSAHIVTINEKSLRELGVKWTLADAQHAGGVGQVTTLGSDLSVATATTHVGFNIGRINGRLLDLELSALEQKQQLDIIASPRLLASHLQPASIKQGSEIPYQVSSGESGATSVEFKEAVLGMEVTPTVLQKGRIRLKLHISQNVPGQVLQQADGEVLAIDKQEIETQVEVKSGETLALGGIFTRKNKSGQDSVPLLGDIPWFGQLFRHDGKEDERRELVVFITPRLVSSE

SEQ ID NO: 848 - protein, 622 aa, Escherichia coli
VADTKAALDGARYILMERFAEDAALLAKVRDYLWKNAHLVSTVVSGKEEEGAKFRDYFDHHEPLSTVPSHRALAMFRGRNEGILQLSLNADPQFEEPPKESYCEQIIMDHLGLRLNNAPADSWRKGVVSWTWRIKVLMHLETELMGTVRERAEDEAINVFARNLHDLLMAAPAGLRATMGLDPGLRTGVKVAVVDATGKLVATDTIYPHTGQAAKAAMTVAALCEKHNVELVAIGNGTASRETERFYLDVQKQFPKVTAQKVIVSEAGASVYSASELAAQEFPDLDVSLRGAVSIARRLQDPLAELVKIDPKSIGVGQYQHDVSQTQLARKLDAVVEDCVNAVGVDLNTASVPLLTRVAGLTRMMAQNIVAWRDENGQFQNRQQLLKVSRLGPKAFEQCAGFLRINHGDNPLDASTVHPEAYPVVERILAATQQALKDLMGNSSELRNLKASDFTDEKFGVPTVTDIIKELEKPGRDPRPEFKTAQFADGVETMNDLQPGMILEGAVTNVTNFGAFVDIGVHQDGLVHISSLSNKFVEDPHTVVKAGDIVKVKVLEVDLQRKRIALTMRLDEQPGETNARRGGGNERPQNNRPAAKPRGREAQPAGNSAMMDALAAAMGKKR

SEQ ID NO: 849 - protein, 693 aa, Escherichia coli
MESKRLDNAALAAGISPNYINAHGKPQSISAETKRRLLDAMHQRTATKVAVTPVPNVMVYTSGKKMPMVVEGSGEYSWLLTTEEGTQYKGHVTGGKAFNLPTKLPEGYHTLTLTQDDQRAHCRVIVAPKRCYEPQALLNKQKLWGACVQLYTLRSEKNWGIGDFGDLKAMLVDVVKRGGSFIGLNPIHALYPANPESASPYSPSSRRWLNVIYIDVNAVEDFHLSEEAQAWWKLPTTQQTLQQARDADWVDYSTVTALKMTALRMAWKGFAQRDDEQMAAFRQFVAEQGDSLFWQAAFDALHAQQVKEDEMRWGWPAWPEMYQNVDSPEVRQFCEEHRDDVDFYLWLQWLAYSQFAACWEISQGYEMPIGLYRDLAVGVAEGGAETWCDRELYCLKASVGAPPDILGPLGQNWGLPPMDPHIITARAYEPFIELLRANMQNCGALRIDHVMSMLRLWWIPYGETADQGAYVHYPVDDLLSILALESKRHRCMVIGEDLGTVPVEIVGKLRSSGVYSYKVLYFENDHEKTFRSPKAYPEQSMAVAATHDLPTLRGYWESGDLTLGKTLGLYPDEVILRGLYQDRELAKQGLLDALHKYGCLPKRAGHKASLMSMTPTLNRGLQRYIADSNSALLGLQPEDWLDMAEPVNIPGTSYQYKNWRRKLSATLEAMFADDGVNKLLKDLDRRRRAAAKK

SEQ ID NO: 850 - protein, 194 aa, Escherichia coli
MIKPTFWRAFALTATLILTGCSHSQPEQEGRPQAWLQPGTRITLPAPGISPAVNSQQLLSGSFNGKTQSLLVMLNADDQKITLAGLSSVGIRLFLVTYDAQGLRAEQSIVVPQLPPASQVLADVMLSHWPISAWQPQLPAGWTLRDNGDKRELRNASGKLVTEITYLNRQGKRVPISIEQHVFKYHITIQYLGD

SEQ ID NO: 851 - protein, 254 aa, Escherichia coli
MPQQIELRNIALQAAQPLVHGVSLTLQRGRVLALVGSSGSGKSLTCAAALGILPAGVRQTAGEILADGKPVSPCALRGIKIATIMQNPRSAFNPLHTMHTHARETCLALGKPADDATLTAALEAVGLENAARVLKLYPFEMSGGMLQRMMIAMAVLCESPFIIADEPTTDLDVVAQARILDLLESIMQKQAPGMLLVTHDMGVVARLADDVAVMSHGKIVEQGDVETLFNAPKHAVTRSLVSAHLALYGMELAS

SEQ ID NO: 852 - protein, 268 aa, Escherichia coli
MTLLNVSDLSHHYAHGGFSGKHQHQAVLNNVSLTLKSGETVALLGRSGCGKSTLARLLVGLESPSQGNISWRGEPLAKLNRAQRKAFRRDIQMVFQDSISAVNPRKTVREILREPMRHLLSLKKSEQLARASEMLKAVDLDDSVLDKRPPQLSGGQLQRVCLARALAVEPKLLILDEAVSNLDLVLQAGVIRLLKKLQQQFGTACLFITHDLRLVERFCQRVMVMDNGQIVETQVVGDKLTFSSDAGRVLQNAVLPAYPVRRRATEKV

SEQ ID NO: 853 - protein, 1157 aa, Escherichia coli
MRKFTLNIFTLSLGLAVMPMVEAAPTAQQQLLEQVRLGEATHREDLVQQSLYRLELIDPNNPDVVAARFRSLLRQGDIDGAQKQLDRLSQLAPSSNAYKSSRTTMLLSTPDGRQALQQARLQATTGHAEEAVASYNKLFNGAPPEGDIAVEYWSTVAKIPARRGEAINQLKRINADTPGNTGLQNNLALLLFSSDRRDEGFAVLEQMAKSNAGREGASKIWYGQIKDMPVSDASVSALKKYLSIFSDGDSVAAAQSQLAEQQKQLADPAFRARAQGLAAVDSGMAGKAIPELQQAVRANPKDSEALGALGQAYSQKGDRANAVANLEKALALDPHSSNNDKWNSLLKVNRYWLAIQQGDAALKANNPDRAERLFQQARNVDNTDSYAVLGLGDVAMARKDYPAAERYYQQTLRMDSGNTNAVRGLANIYRQQSPEKAEAFIASLSASQRRSIDDIERSLQNDRLAQQAEALENQGKWAQAAALQRQRLALDPGSVWITYRLSQDLWQAGQRSQADTLMRNLAQQKPNDPEQVYAYGLYLSGHDQDRAALAHINSLPRAQWSSNIQELVNRLQSNQVLETANRLRESGKEAEAEAMLRQQPPSTRIDLTLADWAQQRRDYTAARAAYQNVLTREPTNADAILGLTEVDIAAGDKAAARSQLAKLPATDNASLNTQRRVALAQAQLGDTAAAQQTFNKLIPQAKSQPPSMESAMVLRDGAKFEAQAGDPTQALETYKDAMVASGVTTMRPQDNDTFTRLTRNDEKDDWLKRGVRSDAADLYRQQDLNVTLEHDYWGSSGTGGYSDLKAHTTMLQVDAPYSDGRMFFRSDFVNMNVGSFSTNADGKWDDNWGTCTLQDCSGNRSQSDSGASVAVGWRNDVWSWDIGTTPMGFNVVDVVGGISYSDDIGPLGYTVNAHRRPISSSLLAFGGQKDSPSNTGKKWGGVRADGVGLSLSYDKGEANGVWASLSGDQLTGKNVEDNWRVRWMTGYYYKVINQNNRRVTIGLNNMIWHYDKDLSGYSLGQGGYYSPQEYLSFAIPVMWRERTENWSWELGASGSWSHSRTKTMPRYPLMNLIPTDWQEEAARQSNDGGSSQGFGYTARALLERRVTSNWFVGTAIDIQQAKDYAPSHFLLYVRYSAAGWQGDMDLPPQPLIPYADW

SEQ ID NO: 854 - protein, 779 aa, Escherichia coli
MKRKLFWICAVAMGMSAFPSFMTQATPATQPLINAEPAVAAQTEQNPQVGQVMPGVQGADAPVVAQNGPSRDVKLTFAQIAPPPGSMVLRGINPNGSIEFGMRSDEVVTKAMLNLEYTPSPSLLPVQSQLKVYLNDELMGVLPVTKEQLGKKTLAQMPINPLFITDFNRVRLEFVGHYQDVCENPASTTLWLDVGRSSGLDLTYQTLNVKNDLSHFPVPFFDPRDNRTNTLPMVFAGAPDVGLQQASAIVASWFGSRSGWRGQNFPVLYNQLPDRNAIVFATNDKRPDFLRDHPAVKAPVIEMINHPQNPYVKLLVVFGRDDKDLLQAAKGIAQGNILFRGESVVVNEVKPLLPRKPYDAPNWVRTDRPVTFGELKTYEEQLQSSGLEPAAINVSLNLPPDLYLMRSTGIDMDINYRYTMPPVKDSSRMDISLNNQFLQSFNLSSKQEANRLLLRIPVLQGLLDGKTDVSIPALKLGATNQLRFDFEYMNPMPGGSVDNCITFQPVQNHVVIGDDSTIDFSKYYHFIPMPDLRAFANAGFPFSRMADLSQTITVMPKTPNEAQMETLLNTVGFIGAQTGFPAINLTVTDDGSTIQGKDADIMIIGGIPDKLKDDKQIDLLVQATESWVKTPMRQTPFPGIVPDESDRAAETQSTLTSSGAMAAVIGFQSPYNDQRSVIALLADSPRGYEMLNDAVNDSGKRATMFGSVAVIRESGINSLRVGDVYYVGHLPWFERLWYALANHPILLAVLAAISVVLLAWVLWRLLRIISRRRLNPDNE

SEQ ID NO: 855 - protein, 872 aa, Escherichia coli
MSILTRWLLIPPVNARLIGRYRDYRRHGASAFSATLGCFWLILAWIFIPLEHPRWQRIRAEHKNLYPHINASRPRPLDPVRYLIQTCWLLIGASRKETPKPRRRAFSGLQNIRGRYHQWMNELPERVSHKTQHLDEKKELGHLSAGARRLILGIIVTFSLILALICVTQPFNPLAQFIFLMLLWGVALIVRRMPGRFSALMLIVLSLTVSCRYIWWRYTSTLNWDDPVSLVCGLILLFAETYAWIVLVLGYFQVVWPLNRQPVPLPKDMSLWPSVDIFVPTYNEDLNVVKNTIYASLGIDWPKDKLNIWILDDGGREEFRQFAQNVGVKYIARTTHEHAKAGNINNALKYAKGEFVSIFDCDHVPTRSFLQMTMGWFLKEKQLAMMQTPHHFFSPDPFERNLGRFRKTPNEGTLFYGLVQDGNDMWDATFFCGSCAVIRRKPLDEIGGIAVETVTEDAHTSLRLHRRGYTSAYMRIPQAAGLATESLSAHIGQRIRWARGMVQIFRLDNPLTGKGLKFAQRLCYVNAMFHFLSGIPRLIFLTAPLAFLLLHAYIIYAPALMIALFVLPHMIHASLTNSKIQGKYRHSFWSEIYETVLAWYIAPPTLVALINPHKGKFNVTAKGGLVEEEYVDWVISRPYIFLVLLNLVGVAVGIWRYFYGPPTEMLTVVVSMVWVFYNLIVLGGAVAVSVESKQVRRSHRVEMTMPAAIAREDGHLFSCTVQDFSDGGLGIKINGQAQILEGQKVNLLLKRGQQEYVFPTQVARVMGNEVGLKLMPLTTQQHIDFVQCTFARADTWALWQDSYPEDKPLESLLDILKLGFRGYRHLAEFAPSSVKGIFRVLTSLVSWVVSFIPRRPERSETAQPSDQALAQQ

SEQ ID NO: 856 - protein, 563 aa, Escherichia coli
MLIQQNSEIINQLAGNTSETYIEDNGAGINYVRTNDNGLAFNDASASGIGATAVGYNAVASGESSVAIGQGSSSNVDTGIALGSSSVSSRVIVKGSRDTSVSEEGVVIGYDTTDGELLGALSIGDDGKYRQIINVADGSEAHDAVTVRQLQNAIGAVATTPTKYFHANSTEEDSLAVGEDSLAMGAKTIVNGNAGIGIGYGAYVDANALNGIAIGSNARANHANSIAMGNGSQTTRGAQTGYAAYNMDAPQNSVGEFSVGSEDGQRQITNVAAGSADTDAVNVGQLKVTDAQVSQNTQSITNLNNQVTNLDTRVTNIENGIGDIVTTGSTKYFKTNTDGVDANAQGKDSVAIGSGSIAAADNSVALGTGSVANEENTISVGSSTNQRRITNVAAGVNATDAVNVSQLKSSEAGGVRYDTKADGSVDYSNITLGGGNGGTTRISNVSAGVNNNDAVNYAQLKQSVQETKQYTDQRMVEMDNKLSKTESKLSGGIASAMAMTGLPQAYTPGASMASIGGGTYNGESAVALGVSMVSANGRWVYKLQGSTNSQGEYSAALGAGIQW

SEQ ID NO: 857 - protein, 416 aa, Escherichia coli
MMAGPVLYQDRAMKQITFAPRNHLLTNTNTWTPDSQWLVFDVRPSGASFTGETIERVNIHTGEVEVIYRASQGAYVGVVTVHPKSEKYVFIHGPENPDETWHYDFHHRRGVIVEGGKVSNLDAMDITAPYTPGALRGGSHVHVFSPNGERVSFTYNDHVMHQLDSALDLRNVGVAAPFGPVNVQKQHPREYSGSHWCVLVSKTTPTPQPGSDEINRAYEEGWVGNHALAFIGDTLSPKGEKVPELFIVELPQDEAGWKAAGDAPLSGTETTLPAPPRGVVQRRLTFTHHRAYPGLVNVPRHWVRCNPQGTQIAFLMRNDNGIVQLWLISPQGGEPRQLTHNKTDIQSAFNWHPSGEWLGFVLDNRIACAHAQSGEVEYLTENHANPPSADAVVFSPDGQWLAWMEGGQLWITETDR

SEQ ID NO: 858 - protein, 460 aa, Escherichia coli; identical to SEQ ID NO: 433

SEQ ID NO: 859 - protein, 253 aa, Escherichia coli; identical to SEQ ID NO: 436

SEQ ID NO: 860 - protein, 319 aa, Escherichia coli
VAQRDYVRRSQPAPSRRKKSTSRKKQRNLPAVSPAMVAIAAAVLVTFIGGLYFITHHKKEESETLQSQKVTGNGLPPKPEERWRYIKELESRQPGVRAPTEPSAGGEVKTPEQLTPEQRQLLEQMQADMRQQPTQLVEVPWNEQTPEQRQQTLQRQRQAQQLAEQQRLAQQSRTTEQSWQQQTRTSQAAPVQAQPRQSKPASSQQPYQDLLQTPAHTTAQSKPQQAAPVARAADAPKPTAEKKDERRWMVQCGSFRGAEQAETVRAQLAFEGFDSKITTNNGWNRVVIGPVKGKENADSTLNRLKMAGHTNCIRLAAGG

SEQ ID NO: 861 - protein, 336 aa, Escherichia coli
VTRHGKYRFADRAMTARNMLMSIKEQTLMTPYLQFDRNQWAALRDSVPMTLSEDEIARLKGINEDLSLEEVAEIYLPLSRLLNFYISSNLRRQAVLEQFLGTNGQRIPYIISIAGSVAVGKSTTARVLQALLSRWPEHRRVELITTDGFLHPNQVLKERGLMKKKGFPESYDMHRLVKFVSDLKSGVPNVTAPVYSHLIYDVIPDGDKTVVQPDILILEGLNVLQSGMDYPHDPHHVFVSDFVDFSIYVDAPEDLLQTWYINRFLKFREGAFTDPDSYFHNYAKLTKEEAINTAMTLWKEINWLNLKQNILPTRERASLILTKSANHAVEEVRLRK

SEQ ID NO: 862 - protein, 855 aa, Escherichia coli
MPQDMINAKPISAAVKEFFGSSQLSQFMDQNNPLSEITHKRRISALGPGGLTRERAGFEVRDVHPTHYGRVCPIETPEGPNIGLINSLSVYAQTNEYGFLETPYRKVTDGVVTDEIHYLSAIEEGNYVIAQANSNLDEEGHFVEDLVTCRSKGESSLFSRDQVDYMDVSTQQVVSVGASLIPFLEHDDANRALMGANMQRQAVPTLRADKPLVGTGMERAVAVDSGVTAVAKRGGVVQYVDASRIVIKVNEDEMYPGEAGIDIYNLTKYTRSNQNTCINQMPCVSLGEPVERGDVLADGPSTDLGELALGQNMRVAFMPWNGYNFEDSILVSERVVQEDRFTTIHIQELACVSRDTKLGPEEITADIPNVGEAALSKLDESGIVYIGAEVTGGDILVGKVTPKGETQLTPEEKLLRAIFGEKASDVKDSSLRVPNGVSGTVIDVQVFTRDGVEKDKRALEIEEMQLKQAKKDLSEELQILEAGLFSRIRAVLVAGGVEAEKLDKLPRDRWLELGLTDEEKQNQLEQLAEQYDELKHEFEKKLEAKRRKITQGDDLAPGVLKIVKVYLAVKRRIQPGDKMAGRHGNKGVISKINPIEDMPYDENGTPVDIVLNPLGVPSRMNIGQILETHLGMAAKGIGDKINAMLKQQQEVAKLREFIQRAYDLGADVRQKVDLSTFSDEEVMRLAENLRKGMPIATPVFDGAKEAEIKELLKLGDLPTSGQIRLYDGRTGEQFERPVTVGYMYMLKLNHLVDDKMHARSTGSYSLVTQQPLGGKAQFGGQRFGEMEVWALEAYGAAYTLQEMLTVKSDDVNGRTKMYKNIVDGNHQMEPGMPESFNVLLKEIRSLGINIELEDE

SEQ ID NO: 863 - protein, 342 aa, Escherichia coli
VAQPGFASRQWLPGMRRKQCRSCLMINRCSAPPGKRFTNYWSNSTNDKRARLWRLISKSSRVSSGRNISCRMATRSCFFRLLQGVEMLRIADKTFDSHLFTGTGKFASSQLMMEAIRACGSQLVTLAMKRVNLLQHNDAILEPLIAAGVTLLPNTSGAKTAEEAIFAAHLAREALGTNWLKLEIHPDARWLLPDPIETLKAAETLVQQGFVVLPYCGADPVLCKRLEEVGCAAVMPLGAPIGSNQGLETRAMLEIIIQQATVPVVVDAGIGVPSHAAQALEMGADAVLVNTAIAVADDPVNMAKAFRLAVEAGLLARQAGPGSRSHFAHATSPLTGFLEASA

SEQ ID NO: 864 - protein, 698 aa, Escherichia coli
MKKRHLLSLLALGISTACYGETYPAPIGPSQSDFGGVGLLQTPTARMAREGELSLNYRDNDQYRYYSASVQLFPWLETTLRYTDVRTRQYSSVEAFSGDQTYKDKAFDLKLRLWEESYWLPQVAVGARDIGGTGLFDAEYLVASKAWGPFDFTLGLGWGYLGTSGNVKNPLCSASDKFCYRDNSYKQAGSIDGSQMFHGPTSLFGGVEYQTPWQPLRLKLEYEGNNYQQDFAGKLEQKSKFNVGAIYRVTDWADVNLSYERGNTFMFGVTLRTNFNDLRPSYNDNARPQYQPQPQDAILQHSVVANQLTLLKYNAGLADPQIQAKGDTLYVTGEQVKYRDSREGIIRANRIVMNDLPDGIKTIRITENRLNMPQVTTETDVASLKNHLGGEPLGHETTLAQTRVEPVVPKSTEQGWYIDKSRFDFHIDPVLNQSVGGPENFYMYQLGVMGTADLWLTDHLLTTGSLFANLANNYDKFNYTNPPQDSHLPRVRTHVREYVQNDVYVNNLQANYFQHLGNGFYGQVYGGYLETMFGGAGAEVLYRPLDSNWAFGLDANYVKQRDWRSAKDMMKFTDYSVKTGHLTAYWTPSFAQDVLVKASVGQYLAGDKGGTLEIAKRFDSGVVVGGYATITNVSKEEYGEGDFTKGVYVSVPLDLFSSGPTRSRAAIGWTPLTRDGGQQLGRKFQLYDMTSDRSVNFR

SEQ ID NO: 865 - protein, 202 aa, Escherichia coli; identical to SEQ ID NO: 444

SEQ ID NO: 866 - protein, 559 aa, Escherichia coli
MSNAINEIDNTDLVFVFGYNPADSHPIVANHVINAKRNGAKIIVCDPRKIETARIADIHIALKNGSNIALLNAMGHVIIEENLYDKAFVASRTEGFEEYRKIVEGYTPESVEDITGVSASEIRQAARMYAQAKSAAILWGMGVTQFYQGVETVRSLTSLAMLTGNLGKPHAGVNPVRGQNNVQGACDMGALPDTYPGYQYVKDPANREKFAKAWGVESLPAHTGYRISELPHRAAHGEVRAAYIMGEDPLQTDAELSAVRKAFEDLELVIVQDIFMTKTASAADVILPSTSWGEHEGVFTAADRGFQRFFKAVEPKWDLKTDWQIISEIATRMGYPMHYNNTQEIWDELRHLCPDFYGATYEKMGELGFIQWPCRDTSDADQGTSYLFKEKFDTPNGLAQFFTCDWVAPIDKLTDEYPMVLSTVREVGHYSCRSMTGNCAALAALADEPGYAQINTEDAKRLGIEDEALVWVHSRKGKIITRAQVSDRPNKGAIYMTYQWWIGACNELVTENLSPITKTPEYKYCAVRVESIADQRAAEQYVIDEYNKLKTRLREAALA

SEQ ID NO: 867 - protein, 226 aa, Escherichia coli
MINVQNVSKTFILHQQNGVRLPVLQRASLTVNAGECVVLHGHSGSGKSTLLRSLYANYLPDEGQIQIKHGEEWVDLVTAPARKVVEIRKTTIGWVSQFLRVIPRISALEVVMQPLLDTGVPREACAAKAARLLTRLNVPERLWHLAPSTFSGGEQQRVNIARGFIVDYPILLLDEPTASLDAKNSAAVVELILEAKARGAAIVGIFHDEAVRNDVADRLHPMGASS

SEQ ID NO: 868 - protein, 338 aa, Escherichia coli
MNAKIIASLAFTSMFSLSTLLSPAHAEEQEKALNFGIISTESQQNLKPQWTPFLQDMEKKLGVKVNAFFAPDYAGIIQGMRFNKVDIAWYGNLSAMEAVDRANGQVFAQTVAADGSPGYWSVLIVNKDSPINNLNDLLAKRKDLTFGNGDPNSTSGFLVPGYYVFAKNNISASDFKRTVNAGHETNALAVANKQVDVATNNTENLDKLKTSAPEKLKELKVIWKSPLIPGDPIVWRKNLSETTKDKIYDFFMNYGKTPEEKAVLERLGWAPFRASSDLQLVPIRQLALFKEMQGVKGNKGLNEQDKLAKTSAIQAQLDDLDRLNNALSAMSSVSKAVQ

SEQ ID NO: 869 - protein, 316 aa, Escherichia coli
MSDISKASLPKAIFLMGPTASGKTALAIELRKILPVELISVDSALIYKGMDIGTAKPNAEELLAAPHRLLDIRDPSQAYSAADFRRDALAEMADITAAGRIPLLVGGTMLYFKALLEGLSPLPSADPEVRARIEQQAAEQGWESLHRQLQEIDPVAAARIHPNDPQRLSRALEVFFISGKTLTELTQTSGDALPYQVHQFAIAPASRELLHQRIEQRFHQMLASGFEAEVRALFARGDLHTDLPSIRCVGYRQMWSYLEGEISYDEMVYRGVCATRQLAKRQITWLRGWEGVHWLDSEKPEQARDEVLQVVGAIAG

SEQ ID NO: 870 - protein, 650 aa, Escherichia coli
MSLMIKFSATLLATLIAASVNAATVDLRIMETTDLHSNMMDFDYYKDTATEKFGLVRTASLINDARNEVKNSVLVDNGDLIQGSPLADYMSAKGLKTGDVHPVYKALNTLDYTVGTLGNHEFNYGLDYLKNALAGAKFPYVNANVIDARTKQPMFTPYLIKDTEVVDKDGKKQTLKIGYIGVVPPQIMGWDKANLSGKVTVNDITETVRKYVPEMREKGADVVVVLAHSGLSADPYKVMAENSVYYLSEIPGVNAIMFGHAHAVFPGKDFADIEGADITKGTLNGVPAVMPGMWGDHLGVVDLQLSNDSGKWQVTQAKAEARPIYDIANKKSLAAEDSKLVETLKADHDATRQFVSKPIGKSADNMYSYLALVQDDPTVQVVNNAQKAYVEHYIQGDPDLAKLPVLSAAAPFKVGGRKNDPASYVEVEKGQLTFRNAADLYLYPNTLIVVKASGKEVKEWLECSAGQFNQIDPNSTKPQSLINWDGFRTYNFDVIDGVNYQIDVTQPARYDGECQMINTNAERIKNLTFNGKPIDPNAMFLVATNNYRAYGGKFAGTGDSHIAFASPDENRSVLAAWIADESKRAGEIHPAADNNWRLAPIAADKKLDIRFETSPSDKAAAFIKEKGQYPMNKVATDDIGFAIYQVDLSK

SEQ ID NO: 871 - protein, 1077 aa, Escherichia coli
MAEQTSRLAIIIDSTGAKNNADNLASSLVKMTQAGETAANSAGKVTKATEDEKNALAKLKAAIDPVGAAIDTVGRRYSELKKFFDKGLIDKEEYEFLVRKLNETTEELSGVAQAQREAEKAGKLAAAQQEAQAQVFQRMLDKIDPLAAALRNLEQQQDELNAAFASGKINGSQFENYSRKIQETRRELTGEAQAEREAAKAHDEQVAALQRLIAQLDPVGTAFNRLVEQQKQLNEAKAKGMLSPEMYEELSGKLRAMRSELEVTQSQLSKTGMSAKQTAFAMRMLPAQMTDIVVGLSTGQSPFMVLMQQGGQLKDMFGGIGPAIKGVGSYVLGLINPFTLAAAAVGVLGLAYYKGSQEQDEFNKSLILTGNQLGTTSGQLADIAQRAGNAADSTTGAAAAVLNQLVRSGKVASSSLEQVTTAIVKTSEVTGISTEQLVNDFNEIAKDPVSAISKLNDQYHFLTLATYNQIKALQDEGNQQEAARIATEAYSSSMIQRTNQIKENLGYLETAWKAVADSAKWAWDSMLDIGREASLDQKISDVLRQIDEIEKNTRPGVFGLGGIGDGGAQNKKLARLKQQLGVLQAEKIAQDVLNSSINDYNKRQQEGIELRQRADAFSKQYQTREQQRASELAKLEKLKNQYSKEEYNNLIAQINERYKDPKQPKAKGYSDDAAQRMIDHLNQQNALLSSQAELTVKLSSSEQELVKWRQQIADLESRPSSKLTQDQKSLLLHREEITALMEKNVAIEKNNRLIKESAEIAAWRDSLQASIDNRQQGYDIQIAGYGVGDKNQQRQQELLRIEREYNNQRLQLERDYADKSRGMSNHVFQEKMQALNDALEREKEIVSQKNEQLDIQAGDWISGASQGFNNWLDDTKDIGAQIKSTTTQMFDGMTDALGDFVTTGKANFRSFATSVISDLSRIALKASITGIFDSISNSSSGGILGTIGSAISKFIPNAKGGVYESPSLSTYSNGIYDSPQFFAFAKGAGVFGEAGPEAIMPLTRTSDGSLGVRAINSKSGNGGRDITYAPVYQITIQNDGQNGEIGPQAIKALMGMVDQRVQGALLNMRRDGGMLSG

SEQ ID NO: 872 - protein, 268 aa, Escherichia coli; identical to SEQ ID NO: 852

SEQ ID NO: 873 - protein, 333 aa, Escherichia coli
KSEKYVFIHGPENPDETWHYDFHHRRGVIVEGGKVSNLDAMDITAPYTPGALRGGSHVHVFSPNGERVSFTYNDHVMHQLDSALDLRNVGVAAPFGPVNVQKQHPREYSGSHWCVLVSKTTPTPQPGSDEINRAYEEGWVGNHALAFIGDTLSPKGEKVPELFIVELPQDEAGWKAAGDAPLSGTETTLPAPPRGVVQRRLTFTHHRAYPGLVNVPRHWVRCNPQGTQIAFLMRNDNGIVQLWLISPQGGEPRQLTHNKTDIQSAFNWHPSGEWLGFVLDNRIACAHAQSGEVEYLTENHANPPSADAVVFSPDGQWLAWMEGGQLWITETDR

SEQ ID NO: 874 - protein, 116 aa, Escherichia coli
SRLLLRSFKILPFIQPVYVLHVFVLSRQISASRRVFVMRFAPFTRQRHHITYLFQLRRPPADAKPCAFIKTVPNPSEKTGQLYCGRQCRKQKGAAPAQPRTDKTASRMVSCAAQGE

SEQ ID NO: 875 - protein, 87 aa, Escherichia coli
LRATGSRVPHRTQYAAGRRPALGLQPCICRYRRKRGDDAGEKSDVRHRSALEAAARSDLFPRRRTAVAAERAKWRIRYHAARQRLIL

SEQ ID NO: 876 - protein, 58 aa, Escherichia coli
TDRRTGQPFWRRGDGDPASAARSRAYGDYRYPRSAGCCSGRAGDRNSRRRNCAQSSRR

SEQ ID NO: 877 - protein, 38 aa, Escherichia coli
LRAGGNAEKEKTDAFARLSTRPGAGLSVAGRSWLANYG

SEQ ID NO: 878 - protein, 54 aa, Escherichia coli
MPAVKRLMSPRTREVHWLPAQLQPSPAQTAWEHSPFWRVRLIMSYWKMADVWMC

SEQ ID NO: 879 - protein, 117 aa, Escherichia coli
LTALKISPFSIVISRCCLVPTVSQPRRQPSVKRWQTSPTVWSASTASLIRWKFSAKSTARSVTITPTSPLTRKLTGISSAKSSSPRWVFSGTRTLPRSNRTTTSPSCLIALRASTPF

SEQ ID NO: 880 - protein, 223 aa, Escherichia coli
TNGNRVNDRSSRQHPLAIVDCGFRLLYAVAGHHHRQHRASLNGAKPRGKSATYAHGHCLLCADRGGDAARQRLAGGQSRRAQYFLYRHRAVYSRFTVLRAFRHAERTVTGTRVTGRWRCDDGAGRKAYGDENRTARAIYGGDDLCHVTRSGRSAAGSGARRSAGGVRIVALDLFDQHSGGNYRRDRHTDVNAELHHADAALRSFRLFIAGGWHGGINPGAGRQ

SEQ ID NO: 881 - protein, 39 aa, Escherichia coli
TGPTGAGYHYANVRTVAGTATEAGASATGGATAMGRHAA

SEQ ID NO: 882 - protein, 381 aa, Escherichia coli
VRGVMLYHTCPWLNLLNGPLMFKRRYVTLLPLFVLLAACSSKPKPTETETTTGTPSGGFLLEPQHNVMQMGGDFANNPNAQQFIDKMVNKHGFDRQQLQEILSQAKRLDSVLRLMDNQAPTTSVKPPSGPNGAWLRYRKKFITPDNVQNGVVFWNQYEDALNRAWQVYGVPPEIIVGIIGVETRWGRVMGKTRILDALATLSFNYPRRAEYFSGELETFLLMARDEQDDPLNLKGSFAGAMGYGQFMPSSYKQYAVDFSGDGHINLWDPVDAIGSVANYFKAHGWVKGDQVAVMANGQAPGLPNGFKTRYSISQLAAAGLTPQQPLGNHQQASLLRLDVGTGYQYWYGLPNFYTITRYNHSTHYAMAVWQLGQAVALARVQ

SEQ ID NO: 883 - protein, 48 aa, Escherichia coli
KRLHHGAFSAVKAAGADGRPGGDPQYRAVFHTLRRNRRYGRWSGSSIG

SEQ ID NO: 884 - protein, 432 aa, Escherichia coli
MRTILRSRFHATFFLPRSRFWHDFEQKQITKAYFLCKICVTERLLISLNAAVCYLRCALFFNLKKRTMKGRWVKYLLMGTVVAMLAACSSKPTDRGQQYKDGKFTQPFSLVNQPDAVGAPINAGDFAEQINHIRNSSPRLYGNQSNVYNAVQEWLRAGGDTRNMRQFGIDAWQMEGADNYGNVQFTGYYTPVIQARHTRQGEFQYPIYRMPPKRGRLPSRAEIYAGALSDKYILAYSNSLMDNFIMDVQGSGYIDFGDGSPLNFFSYAGKNGHAYRSIGKVLIDRGEVKKEDMSMQAIRHWGETHSEAEVRELLEQNPSFVFFKPQSFAPVKGASAVPLVGRASVASDRSIIPPGTTLLAEVPLLDNNGKFNGQYELRLMVALDVGGAIKGQHFDIYQGIGPEAGHRAGWYNHYGRVWVLKTAPGAGNVFSG

SEQ ID NO: 885 - protein, 103 aa, Escherichia coli
ICMQPRWKATVFTVTHARKWTWRSAKRATPGGISATSAPKRTTLACWNKPSLNMVRAAKGNLANICIPTMKPYRGIRYRGHLPPGNLYRNPLMYCFMKVYTAA

SEQ ID NO: 886 - protein, 83 aa, Escherichia coli
NIATPSPLSNASACVHISKSSKTVCGLAIRFSMPKRANAPPPDTPFRSRSTSKAANCALSAPIFCLNAWESNHEIFTTAGAAD

SEQ ID NO: 887 - protein, 50 aa, Escherichia coli
PLSLHLAPTAANPWTAYSQPGGRRASGYYGLGTDSFAGYPAEESGEGDRC

SEQ ID NO: 888 - protein, 55 aa, Escherichia coli
INRCACVRCMHKTSQQKPPMPGSVSRLTSRVMRKKSRLTVATGCLPMCRQSRSRG

SEQ ID NO: 889 - protein, 61 aa, Escherichia coli
ERRSVWLVWYWSSAGRTDASLDHGDCVPRGLVHAASHASGALHLRAGRQRSGNAPFWYQRQ

SEQ ID NO: 890 - protein, 32 aa, Escherichia coli
QSGKDLYYARRRADNLMWRGVDGKSALRDSGR

SEQ ID NO: 891 - protein, 53 aa, Escherichia coli; identical to SEQ ID NO: 522

SEQ ID NO: 892 - protein, 41 aa, Escherichia coli
VADCRGFTVRQPVECGSDACDAQSSSAGNQRPFSAAGARTG

SEQ ID NO: 893 - protein, 56 aa, Escherichia coli
HRRWGSKNFMFWSLPRKKISSRRPNCSTRLKPMPKASVTRSRIFLTRLLVIPPMAY

SEQ ID NO: 894 - protein, 93 aa, Escherichia coli
SDLRQLRDGGVGRNASVAGGDSGAGRSLDDGESAPRGGRSGAKPSGNPAGCLAPSRWSANGRSGCICERGRWCEGNRNQCRLSVTAGDGFQPA

SEQ ID NO: 895 - protein, 71 aa, Escherichia coli
AKRITPGWRNMTLCTRQSGDMRRTHSRTCTQRANLPLSTSPTSGTARSGRHWCRISILPLPPRRKKTKLYV

SEQ ID NO: 896 - protein, 75 aa, Escherichia coli
RPRSGHLSGGETLPRMAATSRSGYPFLNLIYLWRTGLGRNAKNNSGLERLFTDPRFAHRPDVCRLSAHQPRYRIL

SEQ ID NO: 897 - protein, 100 aa, Escherichia coli
DAPAVSRRVYPDVGTYATATARYRGLTSSDVSGLPVNGRLRPARRSSPARKRRDRSGRFPGRSSVPSPAEGTRTWRQTGTPGSRAYRYGYAYRYSSAPVQ

SEQ ID NO: 898 - protein, 65 aa, Escherichia coli; identical to SEQ ID NO: 540

SEQ ID NO: 899 - protein, 94 aa, Escherichia coli
RLFSRCDAPVGCSAPAGSSSQCRLAYLPHSSPAALRAALHARGQSPHGVNPARPAARCRGSAQCRNRKPAFPAPYRPRLSPPPPDAQSTGWRYL

SEQ ID NO: 900 - protein, 50 aa, Escherichia coli
DSPVLLQKLQLTQGTDILSGLFDTGQQCCRIRSILIVVKDNSRFAVDIVL

SEQ ID NO: 901 - protein, 84 aa, Escherichia coli
VGAKIPENSITQCCQHMLVNTTSAALIRLSGEIVAIANHPGAVSQRRFDDRFYQLNARGIKHQNFGFIGNDFIAYRFDIQHQAS

SEQ ID NO: 902 - protein, 60 aa, Escherichia coli
LACRRWSRHPSSVLRLSLQSGAGRYPADRVSPPGLSLPDKHPAGRTSSRVHRSNVWCPYS

SEQ ID NO: 903 - protein, 41 aa, Escherichia coli
HRQFLRLFDNMLHFRADGDNLTKGADVLGGDILQLTAHTNR

SEQ ID NO: 904 - protein, 95 aa, Escherichia coli
LAHNHEPMWQPALRQRFARSQPPLPVRPGYRWQQNEQIHRHPALNAQEMGYNHAAPKFVHALGHPRHKKQCLASPFHQRDVVDARNVHDRDEIRR

SEQ ID NO: 905 - protein, 130 aa, Escherichia coli
CRSGSTPALSPYARAVYAAKSLAESNKVPAHPQWFHVLRQWQPPGYPGLPAHQRTYRLPPATICGPYNRNLRHRHSAYPAPEQRYQPRWCHRASLRRNHALDAADGWQYVAYRERDEQLPARRHHSSQAP

SEQ ID NO: 906 - protein, 66 aa, Escherichia coli
CSGAIPCTTIPPPTRNIASVPTIDNAFINQGAIINNPLPNACISALDFSASQYPRSSILTITPTRP

SEQ ID NO: 907 - protein, 75 aa, Escherichia coli
YSTCATFMLLTSLNPWRKMPSVEAATFSAVAEKAEVYFSNIARLSSNIRINSAAPTVLVTIIGAAILLTRRTASS

SEQ ID NO: 908 - protein, 55 aa, Escherichia coli
SPFADYRRRANQFASDAPVFLPASNQSPTGYRFSSASYPVNQLYFCSCEYWKLTS

SEQ ID NO: 909 - protein, 114 aa, Escherichia coli
RNRRITTPKIAILLAVARKVETGAGAPWYTSGVHRWNGTRESLKPRPTIISPKPASNSGSLSIPSPRFLPNATNDRSPDCAYTSAIPNSRKEDAAAERIVYLILASSERFWRKA

SEQ ID NO: 910 - protein, 159 aa, Escherichia coli
QNAGDRTDNFNGAHHFTGFVARGHKDRIQTGDQFPAKEEFHYRGSKTEGDQCNEEFGEDLEAVDHFFRDEFQPQRHQHRNDKYRDHVHQDQRKGEFHRLTVDLHTGVHSNQTTSNTANRNGHNARQHAERQITTVRRFDNAERHRNGKHNRWPHHRPEN

SEQ ID NO: 911 - protein, 160 aa, Escherichia coli
PTSAPSFSASIAISWLSASPPCPTTSTRLASANGSRVTFFRSSVLTSQSGSAPGTMFSCCIPEGNVAFFTAPAWRARERHSGRFSVCSVAVSAFPQWDLRTLTVEISNEVTWQMLAPCKRQASRVDSSSPNVPGGKRTTSAGVRCHCSTSASSTCSATTG

SEQ ID NO: 912 - protein, 139 aa, Escherichia coli; identical to SEQ ID NO: 476

SEQ ID NO: 913 - protein, 40 aa, Escherichia coli
AKEHRDLCANDHTNSTYSAHDRPAFTADQMTTCRTNHHGQ

SEQ ID NO: 914 - protein, 75 aa, Escherichia coli
TQVMLRKSGVSQRECGPVQRRQNHAEHAAPAPVRRTADNESAGAFYAPSLWSRRVSDKRHRRPVQPRQPLPLRYG

SEQ ID NO: 915 - protein, 129 aa, Escherichia coli
RGSATQIPGAFWSDVGSRAGSAQLQLNMMVRQHLHHAYWRRGVGVDGIYHADTAHIDHRVTAKFRVIDNQHNVARVLNNGAFGANFVVIELQQRAVAIDATNPQNAEIKAELGDKIERRFAYDPTIAAT

SEQ ID NO: 916 - protein, 61 aa, Escherichia coli
RRDHHRKDDTTGQRCAKNTHGQVGSKENKRKAKRAPGGMETKNGDGKLNQIVTGGDHQKMK

SEQ ID NO: 917 - protein, 176 aa, Escherichia coli
AAFPFAIGASAAGNSLPSPCTSESCVISLIDFAPVSVIATFISFSIRFSRLATPAWPAVASAYRKARPSSTVSAPSAIIRTTSSPLRIPLSARMAISPFTASAIAGNARAEESTPSSWRPPWLETTIPSAPKRTASRASSGSRIPLITIGPSQKSRIHSRSFHEMDGSKLFPSQPM

SEQ ID NO: 918 - protein, 75 aa, Escherichia coli
APRYAARQVAKRIRRAAPDAQPLSVVGQNAGQYFASPGRGESAGGSRSPNVHGFYHGPCHRLSVCHDHSRGYAGY

SEQ ID NO: 919 - protein, 195 aa, Escherichia coli
PRINGNHRPFDNVGGGSLHWRVNGCTFSRCTTSTIAGFDIRQIQTASVQCFNVALLFRLSTGAFHILQHARVAFEVKVHVLLRFFTWNVQLPRQTESTHAINQTKVDRFRATALLAGDGFQWQTKHFCRRSPVDIFSFRECGQQAFVTREMRHNAQFNLRVVRRDNHIILWPNKRLADTTTFFVTHRNVLQVRIG

SEQ ID NO: 920 - protein, 146 aa, Escherichia coli
HRWRCSGHREFQTAEQPASQTRYPLLSAAGGQPARRTAFSPSRSRRRQWSLAALRQSPGRYRALRAFRRLVASCAVAADVWSSVRGSGMPVCRPLTSFHNRRCRDSGSARPMLRYGGCSPDGYQYGPAVRRNISRGAGCRADRRWR

SEQ ID NO: 921 - protein, 55 aa, Escherichia coli
EERSELVAIHAPNRKIGASTNSNSTILSSQGMTSNVNNSARIAPKKAPPKRSAIF

SEQ ID NO: 922 - protein, 74 aa, Escherichia coli
SSGTRPASGRPRQWHYPAHPRPGCNASSQPRPAPGDASCRRFAGADAPDPADAAVTSGCRPSQSARYGDAETGC

SEQ ID NO: 923 - protein, 55 aa, Escherichia coli
LRTRHFTMKLRHLLAQHDGVTPNHHIQKTADDQSSDGCQYGHRRGVLLKNIKKHG

SEQ ID NO: 924 - protein, 108 aa, Escherichia coli; identical to SEQ ID NO: 472

SEQ ID NO: 925 - DNA, 1485 bp, Shigella flexneri
atgatcctcaaaattagcaatttcattgacgcaagcaatacaaaagggcctatacgcgttgaagatacagagcatggacctatattgatagcacagaaattcaacctaaaggatctctttttcagaacattaagcactattaatgcaaagataaattcacagatattaaatgaacaactaaaaaattatcgactagagaatcaaaaatccttattgcttttcctcaatacattagctagcgaaaaatctgcagaaagtgcgtttgccgcctatgaagcagctaaaaactcaattcaacactctttcacaggtagagacatcaaattaatgttgaataccgcagagcgttttcatggcatcggtacagccaaaaatcttgaaagacatttagtttttcgttgctggggaaatagaggcataacccatttagggcatactagtatcagtataaaaaacaatttactacaggaaccaactcatacctatctcagctggtatcccggcgggaatgttacaaaagatacagaaataaactacctttttgaaaaacgctcaggttacagtgtcgatacctataagcaagacaaactaaatatgatttcagaccaaacagccgaaagacttgatgcaggccaagaggttagaaacttattaaattcaaaacaagatcaaaataacaacaaaaaaatattttttcccagagctaatcaaaaaaaagacccctatggttattggggggtcagtgctgataaagtatacattccattatcaggtgataataaaacaaaggatggtaaaatcagccataacctttttggccttgatgaaacaaacatgtcaaaatttatatgcaaaaagaaagcagatgctttcagacaattggcaaattataaattaatcagtaaatctgaaaactgtgctggtatggcacttaatgttcttaaagcaggaaattctgaaatatactttccactccctgacgttaaattggttgctacacctaacgatgtatacgcgtatgcaaataaagttaggcaacgcattgaaagtctcaatcagtcttataacgaaataatgaagtatattgaatctgattttgatctttccagattgactcaattacgacgcagctatcttaaaagtttcaataaaattaaccttatccacacaccaaaaacattcaagcctttatcaatttcactttacaaacatcctactgaaaatgtatcttcagaagactttgatgcggtcatcaacgcttgccactcatacttagtaaaatcagcacccagcaatatgactcgtgtattaaacgaattaaaaaccgaagcaacagataaaaaagaagaaatcatcgaaaaatcaataaaaattattgattattacaattctcttaaatcgccagatcttggaaccaaactttacattcacgacttattacagatcaataagcttttattgaataactctcattctaatatatag

SEQ ID NO: 926 - DNA, 1902 bp, Shigella flexneri
atgcataatgtaaataatactcaagcgccaacattcttatataaggcaacttcaccatcatcaacagaatacagcgagttaaaaagcaaaatatccgatatccatagttcgcaaacttctctaaaaacaccagcatcagtgtctgaaaaagaaaactttgcaacgtcttttaatcagaaatgtcttgattttttattttcttcctcagggaaagaagatgtgttaagaagcatttattccaactcaatgaatgcgtatgccaaaagcgagattctcgaattttcaaatgttttgtactccttagtacatcaaaatggtcttaattttgaaaacgaaaagggacttcaaaaaattgtcgcacagtattcggaactaattataaaagataaattatcccaagattctgcctttggaccatggtcggcaaagaataagaaactccatcaattacgacaaaacattgagcacagacttgcactattagcacaacaacacacatctggtgaagctttatcattgggacaaaaactcctcaatactgaagtatcatcatttatcaagaataatattcttgctgaattaaagttaagtaatgaaactgtttcatctctcaaactagatgatttagttgacgcacaggcaaaacttgcctttgatagtttgcgcaatcaacgtaaaaatactattgatagtaaaggatttggtataggtaaactgtcaagagacttaaatacagtagccgtgtttcctgagctgttgagaaaagtccttaatgatattttagaagatataaaagattcgcatcctatccaagatggcctccctacacctcccgaagatatgccagatggcggaccaacccccggagccaatgagaaaacatcccaacctgtaattcactatcatataaataatgataatagaacttacgataatagagtttttgacaacagagtatatgacaatagctatcacgagaacccagaaaatgatgcacagtctcctacttctcagacaaacgatctattatcccgtaacggaaactcattactaaatccacaaagagcactagttcaaaaagtaacttccgttctaccacactctatatcagatactgtccagacatttgcaaataattcagctttagaaaaggctttcaaccatactccagataattcggatggaataggttcagacctgttaactacgagtagtcaagaaagatctgcaaataactctctttctcggggacacaggcctctgaacatacagaactcttcaaccaccccccctctccacccggaaggagtgacaagcagtaatgataactcatcagatacaactaaaagtagcgcttctctttctcatagagtagcttcgcaaatcaataaattcaactcaaacactgattcaaaagtacttcagactgattttttatcaagaaatggagacacatatttaacacgggaaacgatatttgaagcttcaaaaaaagtaacaaactccctaagtaatcttatatctctcattggaactaaatcaggaacacaagaacgagagttacaggaaaaatcaaaggacattacaaaatccacaacagaacatagaataaacaacaaattaaaagttacagatgcaaatataagaaactacgtaacagaaaccaacgcagatacaattgataaaaatcatgcgatctatgaaaaggcaaaagaagtatctagcgccctcagcaaggtattgtcaaaaattgacgatacctctgcagaattacttacagatgatatatctgatttaaaaaataacaatgatattacagctgaaaacaataatatatataaagcagcaaaagatgtaaccacttccctatcaaaagtattaaagaatatcaataaggattaa

SEQ ID NO: 927 - DNA, 1743 bp, Shigella flexneri
atgcataatgtaagcaccacaaccactggttttcctcttgccaaaatattggcttccactgagcttggagacaatactatccaagctgcaaatgatgcagctaacaaattattttctcttacaattgctgatcttactgctaaccaaaatattaatacaactaatgcacactcaacttcaaatatattaatccctgaacttaaagcaccaaagtcattaaatgcaagttcccaactaacgcttttaattggaaaccttattcaaatactcggtgaaaaatctttaactgcattaacaaataaaattactgcttggaagtcccagcaacaggcaagacagcaaaaaaacctagaattctccgataaaattaacactcttctatctgaaactgaaggactaaccagagactatgaaaaacaaattaataaactaaaaaacgcagattctaaaataaaagacctagaaaataaaattaaccaaattcaaacaagattatccgaactcgacccagagtcaccagaaaagaaaaaattaagccgggaagaaatacaactcactatcaaaaaagacgcagcagttaaagacaggacattgattgagcagaaaaccctgtcaattcatagcaaacttacagataaatcaatgcaactcgaaaaagaaatagactctttttctgcattttcaaacacagcatctgctgaacagctatcaacccagcagaaatcattaaccggacttgccagtgttactcaattgatggcaacctttattcaactagttggaaaaaataatgaagaatctttaaaaaatgatctggctctattccagtctctccaagaatcaagaaaaactgaaatggagagaaaatctgatgagtatgctgctgaagtacgtaaagcagaagaactcaacagagtaatgggttgtgttgggaaaatacttggggcacttttaactatcgttagtgttgttgcagcagctttttctggaggagcctctctagcactggcagctgttggtttagctcttatggttacggatgctatagtacaagcagcgaccggcaattccttcatggaacaagccctgaatccgatcatgaaagcagtcattgaacccttaatcaaactcctttcagatgcatttacaaaaatgctcgaaggcttgggcgtcgactcgaaaaaagccaaaatgattggctctattctgggggcaatcgcaggcgctcttgtcctagttgcagcagtcgttctcgtagccactgttggtaaacaggcagcagcaaaacttgcagaaaatattggcaaaataataggtaaaaccctcacagaccttataccaaagtttctcaagaatttttcttctcaactggacgatttaatcactaatgctgttgccagattaaataaatttcttggtgcagcgggtgatgaagtaatatccaaacaaattatttccacccatttaaaccaagcagttttattaggagaaagtgttaactctgccacacaagcgggaggaagtgtcgcttctgctgttttccagaacagcgcgtcgacaaatctagcagacctgacattatcgaaatatcaagttgaacaactgtcaaaatatatcagtgaagcaatagaaaaattcggccaattgcaggaagtaattgcagatctattagcctcaatgtccaactctcaggctaatagaactgatgttgcaaaagcaattttgcaacaaactactgcttga

SEQ ID NO: 928 - DNA, 1149 bp, Shigella flexneri
atgttgcaaaagcaattttgcaacaaactactgcttgatacaaataaggagaatgttatggaaattcaaaacacaaaaccaacccagattttatatacagatatatccacaaaacaaactcaaagttcttccgaaacacaaaaatcacaaaattatcagcagattgcagcgcatattccacttaatgtcggtaaaaatcccgtattaacaaccacattaaatgatgatcaacttttaaagttatcagagcaggttcagcatgattcagaaatcattgctcgccttactgacaaaaagatgaaagatcgttcagagatgagtcacacccttactccagagaacactctggatatttccagtctttcttctaatgctgtttctttaattattagtgtagccgttctactttctgctctccgcactgcagaaactaaattgggctctcaattgtcattgattgcgttcgatgctacaaaatcagctgcagagaacattgttcggcaaggcctggcagccctatcatcaagcattactggagcagtcacacaagtaggtataacgggtatcggtgccaaaaaaacgcattcagggattagcgaccaaaaaggagccttaagaaagaaccttgccactgctcaatctcttgaaaaagagcttgcaggttctaaattagggttaaataaacaaatagatacaaatatcacctcaccacaaactaactctagcacaaaatttttaggtaaaaataaactggcgccagataatatatccctgtcaactgaacataaaacttctcttagttctcccgatatttctttgcaggataaaattgacacccagagaagaacttacgagctcaataccctttctgcgcagcaaaaacaaaacattggccgtgcaacaatggaaacatcagccgttgctggtaatatatccacatcaggagggcgttatgcatctgctcttgaagaagaagaacaactaatcagtcaggccagcagtaaacaagcagaggaagcatcccaagtatctaaagaagcatcccaagcgacaaatcaattaatacaaaaattattgaatataattgacagcatcaaccaatcaaagaattcgacagccagtcagattgctggtaacattcgagcttaa

SEQ ID NO: 929 - DNA, 999 bp, Shigella flexneri
atgaatataacaactctgactaatagtatttccacctcatcattcagtccaaacaataccaacggttcatcaaccgaaacagttaattctgatataaaaacaacgaccagttctcatcctgtaagttcccttactatgctcaacgacacccttcataatatcagaacaacaaatcaggcattaaagaaagagctttcacaaaaaacgttgactaaaacatcgctagaagaaatagcattacattcatctcagattagcatggatgtaaataaatccgctcaactattggatattctttccaggcacgaatatccaattaataaagacgcaagagaattattacattcagctccgaaagaagccgagcttgatggagatcaaatgatatctcatagagaactgtgggctaaaattgcaaactccatcaatgatattaatgaacagtatctgaaagtatatgaacatgccgttagttcatatactcaaatgtatcaagattttagcgctgttctttccagtcttgccggctggatctctcccggaggtaacgacggaaactccgtgaaattacaagtcaactcgcttaaaaaggcattggaagaactcaaggaaaaatataaagataaaccgctatatccagcaaataatactgttagtcaggaacaagcaaataaatggcttacagaattaggtggaacaatcggcaaggtatctcaaaaaaacgggggatatgttgtcagtataaacatgaccccaatagacaatatgttaaaaagcttagataatctaggtggaaatggcgaggttgtgctagataatgcaaaatatcaggcatggaatgccggattctctgccgaagatgaaacaatgaaaaataatcttcaaactttagttcaaaaatacagtaatgccaatagtatttttgataatttagtaaaggttttgagtagtacaataagctcatgtacagatacagataaactttttctccatttctga

SEQ ID NO: 930 - DNA, 1749 bp, Shigella flexneri
ttgataagaattctagttataatgattaaatcaaccaatatacaggcaatcggttctggcattatgcatcaaataaacaatgtatactcgttaactccattatctttacctatggaactgactccatcttgtaatgaattttatttaaaaacctggagcgaatgggaaaagaacggtaccccaggcgagcaacgcaatatcgccttcaataggctgaaaatatgtttacaaaatcaagaggcagaattaaatttatctgagttagatttaaaaacattaccagatttaccgcctcagataacaacactggaaataagaaaaaacctattaacacatctccctgatttaccaccaatgcttaaggtaatacatgctcaatttaatcaactggaaagcttacctgccttacccgagacgttagaagagcttaatgcgggtgataacaagataaaagaattaccatttcttcctgaaaatctaactcatttacgggttcataataaccgattgcatattctgccactattgccaccggaactaaaattactggtagtttctggaaacagattagacagcattcccccctttccagataagcttgaagggctggctctggctaataattttatagaacaactaccggaattaccttttagtatgaacagggctgtgctaatgaataataatctgacaacacttccggaaagtgtcctgagattagctcagaatgccttcgtaaatgttgcaggtaatccattgtctggccataccatgcgtacactacaacaaataaccaccggaccagattattctggtcctcaaatatttttctctatgggaaattctgccacaatttccgctccagaacactccctggctgatgccgtgacagcatggttcccggaaaacaaacaatctgatgtatcacagatatggcatgcttttgaacatgaagagcatgccaacaccttttccgcgttccttgaccgcctttccgataccgtctctgcacgcaatacctccggattccgtgaacaggtcgctgcatggctggaaaaactcagtgcctctgcggagcttcgacagcagtctttcgctgttgctgctgatgccactgagagctgtgaggaccgtgtcgcgctcacatggaacaatctccggaaaaccctcctggtccatcaggcatcagaaggccttttcgataatgataccggcgctctgctctccctgggcagggaaatgttccgcctcgaaattctggaggacattgcccgggataaagtcagaactctccattttgtggatgagatagaagtctacctggccttccagaccatgctcgcagagaaacttcagctctctactgccgtgaaggaaatgcgtttctatggcgtgtcgggagtgacagcaaatgacctccgcactgccgaagccatggtcagaagccgtgaagagaatgaatttacggactggttctccctctggggaccatggcatgctgtactgaagcgtacggaagctgaccgctgggcgcaggcagaagagcagaagtatgagatgctggagaatgagtactctcagagggtggctgaccggctgaaagcatcaggtctgagcggtgatgcggatgcggagagggaagccggtgcacaggtgatgcgtgagactgaacagcagatttaccgtcagttgactgacgaggtactggccctgcgattgtctgaaaacggctcaaatcatatcgcataa

SEQ ID NO: 931 - DNA, 1725 bp, Shigella flexneri
atgaaaccgatcaacaatcattctttttttcgttccctttgtggcttatcatgtatatctcgtttatcggtagaagaacagtgtaccagagattaccaccgcatctgggatgactgggctagggaaggaacaacaacagaaaatcgcatccaggcggttcgattattgaaaatatgtctggatacccgggagcctgttctcaatttaagcttactgaaactacgttctttaccaccactccctttgcatatacgtgaacttaatatttccaacaatgagttaatctccctacctgaaaattctccgcttttgacagaacttcatgtaaatggtaacaacttgaatatactcccgacacttccatctcaactgattaagcttaatatttcattcaatcgaaatttgtcatgtctgccatcattaccaccatatttacaatcactctcggcacgttttaatagtctggagacgttaccagagcttccatcaacgctaacaatattacgtattgaaggtaatcgccttactgtcttgcctgaattgcctcatagactacaagaactctttgtttccggcaacagactacaggaactaccagaatttcctcagagcttaaaatatttgaaggtaggtgaaaatcaactacgcagattatccagattaccgcaagaactattggcactggatgtttccaacaacctactaacttcattacccgaaaatataatcacattgcccatttgtacgaatgttaacatttcagggaatccattgtcgactcacgttctgcaatccctgcaaagattaacctcttcgccggactaccacggcccgcagatttacttctccatgagtgacggacaacagaatacactccatcgccccctggctgatgccgtgacagcatggttcccggaaaacaaacaatctgatgtatcacagatatggcatgcttttgaacatgaagagcatgccaacaccttttccgcgttccttgaccgcctttccgataccgtctctgcacgcaatacctccggattccgtgaacaggtcgctgcatggctggaaaaactcagtgcctctgcggagcttcgacagcagtctttcgctgttgctgctgatgccactgagagctgtgaggaccgtgtcgcgctcacatggaacaatctccggaaaaccctcctggtccatcaggcatcagaaggccttttcgataatgataccggcgctctgctctccctgggcagggaaatgttccgcctcgaaattctggaggacattgcccgggataaagtcagaactctccattttgtggatgagatagaagtctacctggccttccagaccatgctcgcagagaaacttcagctctctactgccgtgaaggaaatgcgtttctatggcgtgtcgggagtgacagcaaatgacctccgcactgccgaagccatggtcagaagccgtgaagagaatgaatttacggactggttctccctctggggaccatggcatgctgtactgaagcgtacggaagctgaccgctgggcgcaggcagaagagcagaagtatgagatgctggagaatgagtactctcagagggtggctgaccggctgaaagcatcaggtctgagcggtgatgcggatgcggagagggaagccggtgcacaggtgatgcgtgagactgaacagcagatttaccgtcagttgactgacgaggtactggcctga

SEQ ID NO: 932 - DNA, 1698 bp, Shigella flexneri
atgttctctgtaaataatacacactcatcagtttcttgctccccctctattaactcaaactcaaccagtaatgaacattatctgagaatcctgactgaatgggaaaagaactcttctcccggggaagagcgaggcattgcttttaacagactctcccagtgctttcagaatcaagaagcagtattaaatttatcagacctaaatttgacgtctcttcccgaattaccaaagcatatttctgctttgattgtagaaaataataaattaacatcattgccaaagctgcctgcatttcttaaagaacttaatgctgataataacaggctttctgtgataccagaacttcctgagtcattaacaactttaagtgttcgttctaatcaactggaaaaccttcctgttttgccaaaccatttaacatcattatttgttgaaaataacaggctatataacttaccggctcttcccgaaaaattgaaatttttacatgtttattataacaggctgacaacattacccgacttaccggataaactggaaattctctgtgctcagcgcaataatctggttacttttcctcaattttctgatagaaacaatatcagacaaaaggaatattattttcattttaatcagataaccactcttccggagagtttttcacaattagattcaagttacaggattaatatttcagggaatccattgtcgactcgcgttctgcaatccctgcaaagattaacctcttcgccggactaccacggcccacagatttacttctccatgagtgacggacaacagaatacactccatcgccccctggctgatgccgtgacagcatggttcccggaaaacaaacaatctgatgtatcacagatatggcatgcttttgaacatgaagagcatgccaacaccttttccgcgttccttgaccgcctttccgataccgtctctgcacgcaatacctccggattccgtgaacaggtcgctgcatggctggaaaaactcagtgcctctgcggagcttcgacagcagtctttcgctgttgctgctgatgccactgagagctgtgaggaccgtgtcgcgctcacatggaacaatctccggaaaaccctcctggtccatcaggcatcagaaggccttttcgataatgataccggcgctctgctctccctgggcagggaaatgttccgcctcgaaattctggaggacattgcccgggataaagtcagaactctccattttgtggatgagatagaagtctacctggccttccagaccatgctcgcagagaaacttcagctctctactgccgtgaaggaaatgcgtttctatggcgtgtcgggagtgacagcaaatgacctccgcactgccgaagccatggtcagaagccgtgaagagaatgaatttacggactggttctccctctggggaccatggcatgctgtactgaagcgtacggaagctgaccgctgggcgcaggcagaagagcagaagtatgagatgctggagaatgagtactctcagagggtggctgaccggctgaaagcatcaggtctgagcggtgatgcggatgcggagagggaagccggtgcacaggtgatgcgtgagactgaacagcagatttaccgtcagttgactgacgaggtactggccctgcgattgtctgaaaacggctcacgactgcaccattcataa

SEQ ID NO: 933 - DNA, 1668 bp, Shigella flexneri
ttgtccaccggctttaactggatgcccatcatgttaccgataaataataacttttcattgccccaaaattctttttataacactatttccggtacatatgctgattacttttcagcatgggataaatgggaaaaacaagcgctccccggtgaagagcgtgatgaggctgtctcccgacttaaagaatgtcttatcaataattccgatgaacttcgactggaccgtttaaatctgtcctcgctacctgacaacttaccagctcagataacgctgctcaatgtatcatataatcaattaactaacctacctgaactgcctgttacgctaaaaaaattatattccgccagcaataaattatcagaattgcccgtgctacctcctgcgctggagtcacttcaggtacaacacaatgagctggaaaacctgccagctttacccgattcgttattgactatgaatatcagctataacgaaatagtctccttaccatcgctcccacaggctcttaaaaatctcagagcgacccgtaatttcctcactgagctaccagcattttctgagggaaataatcccgttgtcagagagtatttttttgatagaaatcagataagtcatatcccggaaagcattcttaatctgaggaatgaatgttcaatacatattagtgataacccattatcatcccatgctctgccagccctgcaaagattaacctcttcgccggactaccacggcccacggatttacttctccatgagtgacggacaacagaatacactccatcgccccctggctgatgccgtgacagcatggttcccggaaaacaaacaatctgatgtatcacagatatggcatgcttttgaacatgaagagcatgccaacaccttttccgcgttccttgaccgcctttccgataccgtctctgcacgcaatacctccggattccgtgaacaggtcgctgcatggctggaaaaactcagtgcctctgcggagcttcgacagcagtctttcgctgttgctgctgatgccactgagagctgtgaggaccgtgtcgcgctcacatggaacaatctccggaaaaccctcctggtccatcaggcatcagaaggccttttcgataatgataccggcgctctgctctccctgggcagggaaatgttccgcctcgaaattctggaggatattgcccgggataaagtcagaactctccattttgtggatgagatagaagtctacctggccttccagaccatgctcgcagagaaacttcagctctccactgccgtgaaggaaatgcgtttctatggcgtgtcgggagtgacagcaaatgacctccgcactgccgaagccatggtcagaagccgtgaagagaatgaatttacggactggttctccctctggggaccatggcatgctgtactgaagcgtacggaagctgaccgctgggcgcaggcagaagagcagaaatatgagatgctggagaatgagtaccctcagagggtggctgaccggctgaaagcatcaggtctgagcggtgatgcggatgcggagagggaagccggtgcacaggtgatgcgtgagactgaacagcagatttaccgtcagctgactgacgaggtactggccctgcgattgcctgaaaacggctcacaactgcaccattcataa

SEQ ID NO: 934 - DNA, 252 bp, Shigella flexneri
atgagtgttacagtaccgaatgatgattggacattgagttcattatctgaaacttttgatgatggaactcaaacattacaaggtgaactaacattggcactagataaattagctaaaaatccttcgaatccacagttgctggctgaataccaaagtaaattatctgaatatacattatataggaacgcgcaatccaatacagtgaaagtgattaaggatgttgatgctgcaattattcaaaacttcagataa

SEQ ID NO: 935 - DNA, 4095 bp, Shigella flexneri
atgaacaaaatatattatcttaagtattgccatataaccaaaagcctgattgctgtctccgaactggcccgcagggttacctgcaaaagccatcgcagactttcacgtcgggttattcttacgtctgttgcagctttatcactttcctcggcatggccagctctgtcagcaacggtcagtgcagagatcccttatcagatattccgcgactttgccgagaataaaggtcagtttacgccggggaccacgaatatttccatttacgacaagcagggcaatctggtcggtaaacttgataaagccccgatggctgatttcagtagtgccactattactaccggtagcctgcctccgggagaccatacactttactcccctcagtatgtggttaccgccaaacatgtcagcggttctgacacgatgagcttcggatacgccaaaaacacctatactgcggttggtacaaataataatagcggtcttgatattaaaacccgccgcctgagtaaactggtgacagaggtggcgccggcagaagtgtctgacatcggggctgtgagcggtgcctatcaggccggcggacgctttactgaattctatcgccttgggggggggatgcagtacgtcaaagacaaaaatggtaatcgcacccaagtgtataccaatggcggatttcttgttgggggaaccgtcagcgcgctgaactcctataacaacggacagatgattacagctcagaccggtgacatttttaatcccgcgaatggacctctggctaattatctgaatatgggggacagcggctcccccctgtttgcttatgattccctgcaaaaaaaatgggtactgattggcgtgctttcctcaggaactaactatggaaataactgggtcgtcaccactcaggatttccttggtcagcaaccgcaaaatgattttgacaaaactatagcctacacctctggtgaaggagtactgcagtggaaatatgatgcggctaatggcaccggcacactgactcagggaaacacgacttgggatatgcatggaaagaaaggaaatgatctgaacgcaggaaaaaacctcctgttcaccggcaataatggcgaggtcgttctgcagaattccgttaatcagggagctgggtatctgcagtttgccggcgattacagggtgtccgccctgaacggccagacatggatggggggcgggattatcaccgataaaggaacccacgttctgtggcaggtgaacggagttgccggtgataacctgcataaaactggcgaaggtaccctgacagtaaacgggaccggtgtgaatgcaggcggactcaaggtgggggacggtaccgttattctcaaccagcaggcggatgctgacggaaaggtacaggctttcagctctgttggtattgccagcggtcgtccgacagttgtgctttctgactcacagcaagttaatccggataatatttcgtggggataccgtggaggacgtctggaactgaatggtaataatctgacctttacccgtcttcaggcggctgactacggggccatcattaccaataacagtgagaaaaaatcaacggtaacactcgaccttcagacattaaaagccagtgacatcaatgtaccggttaatactgtcagtatttttggggggagaggagcgccgggagacctatattatgacagttctaccaagcaatatttcatcctgaaagcgagttcatattccccgttcttctccgatctgaacaacagcagtgtctggcagaatgtcggaaaagatcgtaataaagccattgatactgtgaagcaacaaaaaattgaggccagcagccagccttatatgtatcacggccaactaaacggcaatatggatgtgaatattccgcagctctcaggtaaggatgtactggctcttgatggttcagttaacctgccagaaggttcgataaccaagaagtccggcacgctgatattccagggtcatccagttattcatgctggaacgacgacttcttccagccagagcgactgggaaacccgtcagtttacgctggaaaaactgaaactcgatgcggcaacattccatctgtccagaaacggcaagatgcagggagatattaacgccaccaatggaagtacagtcattctgggaagtagccgtgtctttactgacaggagtgacggaaccggtaatgcggtcttctctgttgaagggagtgccactgcaaccacagttggtgaccagagtgattacagcggaaatgttacgctggaaaataaatcatccctgcaaatcatggagagattcaccggtggtattgaggcttatgatagcaccgtgagtgtgacctctcagaatgctgtttttgaccgtgttggcagctttgtcaacagcagcctgaccctcggaaaaggagcaaaacttacggctcagagcggtattttcagcaccggggctgtggatgtaaaagaaaatgcttctctgaccctgacggggatgccttctgcgcagaaacaggggtattactcacccgtaatttctacaacagaagggattaacctcgaagataacgccagcttttctgttaaaaatatgggctatctgagttcggatattcatgcaggaaccactgcggcaaccattaatctgggagacagtgatgctgatgcagggaagacggactctccgttattcagctccttaatgaagggatataacgctgttctgagaggcagtattacgggggcacagagtacggtaaatatgatcaatgctctgtggtactctgacggaaaatcagaggccggtgcactgaaggctaagggctcgcgaattgaactgggggacgggaaacactttgccactttacaagtaaaagagctttctgcagataataccacgttcctgatgcataccaacaacagccgggctgaccagttgaatgtcacagacaaactgtcaggcagtaataatagcgtcctggttgactttttaaacaaaccagccagtgaaatgagcgtgacgttaattaccgcaccgaaagggagtgatgagaaaacgttcactgccggtacgcagcagattggtttcagtaacgttacgccagtaatcagcacggaaaaaacggatgatgccacaaaatgggtgctgacaggatatcagactaccgctgatgccggagcctcgaaagccgcaaaagactttatggcatcaggttataagtccttccttacagaggtcaataacctgaacaaacgtatgggtgacctgcgggatactcagggggatgccggtgtctgggcacgcataatgaatggtaccggttcggcagatggtgactacagcgataactacactcacgttcagattggtgtcgacagaaagcatgagctggacggtgtggatttatttacgggggcattgctgacctatacggacagcaatgcaagcagccacgcattcagtggaaaaaacaaatccgtgggtggcggtctgtatgcctctgcactctttaattccggagcttattttgacctgattggtaaatatctccatcatgataatcagcacacggcgaattttgcctcactgggaacaaaagactacagctctcattcctggtatgccggtgctgaagttggttatcgttaccacctgacgaaagagtcctgggtggagccacagatagagctggtttacggttctgtatcaggaaaagcttttagctgggaagaccggggaatggctctgagcatgaaagacaaggattataacccactgattggccgtactggtgttgacgtgggaagagccttctccggagacgactggaaaatcacagctcgagccgggctgggttatcagttcgacctgctggcgaacggagaaacggttctgcaggatgcttccggagagaaacgtttcgaaggtgaaaaagatagcaggatgctgatgacggtagggatgaatgcggaaattaaggataatatgcgtttgggactggagctggagaaatcagcgttcgggaaatataatgtggataatgcgataaacgccaacttccgttatgttttctga

SEQ ID NO: 936 - DNA, 2817 bp, Shigella flexneri
atgagtgactataaatcaaccctgaatttgccggaaacagggttcccgatgcgtggcgatctcgccaagcgcgaaccgggaatgctggcgcgttggactgatgatgatctgtacggcatcatccgtgcggctaaaaaaggcaaaaaaaccttcattctgcatgatggccctccttatgcgaatggcagcattcatattggtcactcggttaacaagattctgaaagacattatcgtgaagtccaaagggctttccggttatgactcgccgtatgtgcctggctgggactgccacggtctgccgatcgagctgaaagtagagcaagaatacggtaagccgggtgagaaattcaccgccgccgagttccgcgccaagtgccgcgaatacgcggcgacccaggttgacggtcaacgcaaagactttatccgtctgggcgtgctgggcgactggtcgcacccgtatctgactatggacttcaaaactgaagccaacatcatccgcgcgctgggcaaaatcatcggcaatggtcacctgcacaaaggcgcgaagccggtgcactggtgcgtagactgccgttctgcactggcagaagcggaagttgagtattacgacaaaacttctccgtccattgacgtcgctttccaggcggtcgatcaggatgcgctgaaagcgaaatttggcgtaagcaacgttaacggcccaatctcgctggtgatctggaccactacgccgtggactctgcctgcgaaccgcgcaatctctattgcacctgatttcgactatgcgctggtgcagatcgacggtcaggccgtgattctggcgaaagatctggttgaaagcgtaatgcagcgtatcggcgtgaccgattacaccattctcggcacggtaaaaggtgcagagcttgagctgctgcgctttacccatccgtttatgggcttcgacgttccggcaatcctcggcgatcacgttaccctggatgccggtaccggtgccgttcacaccgcgcctggccacggcccggacgactatgtgatcggtcagaaatacggcctggaaaccgctaacccggttggcccggacggcacttatctgccgggcacttatccgacgctggatggcgtgaacgtcttcaaagcgaacgacatcgtcgttgcgctgctgcaggaaaaaggcgcgctgctgcacgttgagaaaatgcagcacagctatccgtgctgctggcgtcacaaaacgccgatcatcttccgcgcgacaccgcagtggttcgtcagcatggatcagaaaggtctgcgtgcgcagtcactgaaagagatcaaaggcgtgcagtggctcccggactggggccaggcgcgtatcgagtcgatggttgctaaccgtcctgactggtgtatctcccgtcagcgcacctggggcgtaccgatgtcactgttcgtgcacaaagacacggaagagctgcatccgcgtaccctcgaactgatggaagaagtggctaaacgcgttgaagttgacggcatccaggcgtggtgggatctcgatgcgaaagagatcctcggcgacgaagctgaccagtatgtgaaagtgccggatactctcgacgtatggtttgactccggatctacccactcttctgttgttgacgtgcgtccggaatttgccggtcacgcagcggacatgtatctggaaggttctgaccagcaccgtggttggttcatgtcttccctaatgatctccaccgcgatgaaaggcaaagcgccgtatcgtcaggtactgacccacggctttaccgtggatggtcagggtcgcaagatgtctaaatccatcggcaacaccgtttcgccgcaggatgtgatgaacaaactgggcgcggatattctgcgtctgtgggtggcatcaaccgactacaccggtgaaatggccgtttctgacgagatcctgaaacgtgctgccgatagctatcgtcgtatccgtaacaccgcgcgcttcctgctggcaaacctgaatggttttgatccagcaaaagatatggtgaaaccggaagagatggtggtactggatcgctgggccgtaggttgtgcgaaagcggcacaggaagacatcctcaaggcgtacgaagcatacgatttccacgaagtggtacagcgtctgatgcgcttctgctccgttgagatgggttccttctacctcgacatcatcaaagaccgtcagtacaccgccaaagcggatagcgtggcgcgtcgtagctgccagactgcgctgtatcacatcgctgaagcgctggtgcgctggatggcaccaatcctctccttcaccgctgatgaagtgtggggctatctgccgggcgaacgtgaaaaatacgtcttcaccggtgagtggtacgaaggcctgtttggtctggcagacagtgaagcaatgaacgatgcgttctgggacgagctgttgaaagtgcgtggcgaagtgaacaaagtcattgagcaagcgcgtgccgacaagaaagtgggtggctcgctggaagcggcagtaaccttgtatgcagaaccggaactggcggcgaaactgaccgcgctgggcgatgaattacgatttgtcctgttgacctccggcgctaccgttgcagactataacgacgcacctgctgatgctcagcagagcgaagtactcaaagggctgaaagtcgcgttgagtaaagccgaaggtgagaagtgcccacgctgctggcactacacccaggatgtcggcaaggtggcggaacacgcagaaatctgcggccgctgtgtcagcaacgtcgccggtgacggtgaaaaacgtaagtttgcctga

SEQ ID NO: 937 - DNA, 501 bp, Shigella flexneri
ttgccatgttttacggcaatgagagcagagatagcgctgatgtccggcagtgcttttgccgttacgcaccacgccttcagtagcggagcaggaaggacatctgatggaaatggaagccacgcaagcaccttaaaatcaccatcatacactaaatcagtaagttggcagcattacccaacaaaggttggtactgaaaacgggcaactccttggtaatactctcacaggtaatgatgcagcaaaaggagtcggtgtactcatagaaggtttagcaactagtaaaaatcctctaatgacattgaaacctaatgattcaaattctgtttataaagattacgacccgagaggcaaagacgatacaacaggaggagtttacccggatcaagatacaggtataacataccctctccatttccaggccacgctacaacaggatggaactataccaatagaagctggtgagtttaaagccaccagtactttccaggtaacctacccttaa

SEQ ID NO: 938 - DNA, 846 bp, Shigella flexneri
atggcgctttctccgttgttatggcagatgaataccgcccacgcggcggctattgaccccaatcgtattgtggcgctggagtggttgccggtggaattactgctggcgctcggcatcgtgccttacggcgtggcggataccatcaactatcgcctgtgggtcagcgaaccaccattgccggactcagtgattgacgtcggtttgcgtacagaacctaaccttgaactgctgaccgaaatgaaaccgtcgtttatggtctggtcggcaggatatggcccttcatcagaaatgctggcacgtattgcgccgggtcgcggatttaacttcagtgacggcaaacatccgttggcgatggcgcgtaaatcgctgacggaaatggcagatttacttaacctgcaaagcgcagcggaaacgcatttagcgcaatacgaagactttatccgcagcatgaaaccccgctttgtgaagcgtggtgcacgcccgttactgctgacgacgcttatcgatccgcgccatatgctggtcttcggtccaaacagcttgttccaggaaattctcgatgagtacggcatcccaaatgcctggcaaggggaaaccaacttctggggcagtaccgccgtcagtatcgatcgtctggcagcgtataaagacgttgatgtgctctgttttgatcacgacaacagcaaagacatggatgcgctaatggcaaccccgctgtggcaggccatgccgtttgtccgtacagggcgctttcagcgcgtacccgcagtctggttttatggtgcaacgctttcggcaatgcactttgtgcgtgttctggataacgccatcggaggtaaagcgtga

SEQ ID NO: 939 - DNA, 2289 bp, Shigella flexneri
gtgattgaggacggctcccccaatgtctttctcggcggcggtacgcagacggtactggaaatcagcccggaaatccctgactggctgcgtcaggtggtggatgtgctgtatgtggtcgccggaatgcttggcgggctggctggcgcctggcgtcaggcggcaaagatggggtcgaaatttggtacaaaatgtgcggcaaaatttattggtggcgaaatggtcgggatggccatctctgacacagtcatgggattgttcagcaatccggtagatgtcaccactgggcaaaaaattttgctgccggagacggattttaccctgccaggacgcctgcctgtcacctgttcgcgcttttacgccagccacctggaaactgaaggattgctgggcagaggatggcggctgaactgggagataaacctgcgtgaggatgaaacatatatcaccttcatcggtgtacagggtcgggaactgagttatccgaaagagatgctgataccgggccaccagatattcgacccggaagagcagttttacctgagccgtctgcatgacggatgctatgtgctgcattacaccgaccgcagctattacgtgtttgatgaatttgatgaccacggcgtcgcgccgttactttttatggagacgccgtaccggcagcgtattgctttcgggcgtgagaacggcaggctggtgcgggtggcctccagcagcggacaccatctgttattgcaccgcacgatgacgcaagcaggggaacgcctgtcgcatattgaacttttgaagggcgggcgtcccggtaacctggtggaatatcgttacgacgataacgggcaactgactggcgtggtgaaccgggctggtgtgacggtgcgccagtttgcctatgaaaatggcctgatgacagagcatcgcaacgcgacgggctttacctgtacctaccactgggaagagattgaaggtttcccgcgcgtggtggaacacacgaccagcgacggcgaggattaccggttccactatgattttgctggcgggcagacggtggtaaccggcaggccggagcagaagtggcagtggtggtttgatgaagagacgtatgtgactgcgcaccggacgccgggcggcggaatgtaccgcttcacgtacaacgaaaaccattttccggtagcggtggaactccccggcgaacgcagggtaacgctggaatacgacaccctgagccgggtggtgaaagagacggacccggcaggccgggtgacacagacgcagtggaacggcagttttgctgaaatcacgcgccgggcgctggatgacgaccacgtatggaaggcggattacaacgaacacggccaggtgatacgggagacggacccggaagggcgcgtcacgcggtacgggtatgatgatcaggggctgccggagacggtctgccaccccggtaaacagcaggaccgttacacctggaacgcgctggggttactgagcagccaccgtcgcatcacgggcagtgtgcagtcctggcagtatacgcagcgcgggatgctggcgcgccatacggatgaagagaaacgggagacgcgctggcagtacaccccggaagggctggttgccagtctgagcaacggcaacggggctcagtaccggttcagctacgacggcgacggacggctgacgggagaacagcgcccggacggcctgataaggatgtttgcgctgaatgcggacgggtttccggtcatcatcccgacgcagggcacagagggcggggtgcgcaatgaacagcaggagcgtgatgcgctgggccgcctgctgcgcagtgacacgcagcacagtacacggaccttcagctacaaccgtcttgaccagataacggaagtgacgctcacccccacggaagaaggggaacggctgcaccacatgcaggcggacacggtgcgttttgcgtatgaccgcagcgggtggctgacggcagagcacagcgtgcacggcagtatcaaataccggcgcgatgcgctgggcaatcccaccgatatcacgttgccggacgggcagcatctcagtcatctttactacggcagcgggcatctgctccagacggcactggacggtatcacggtcagtgaatatgagcgtgacagcctgcaccgtcaggtgatacgcacgcaggggaaactggcgacgttcagcggctacaacgccgacaaccggttaagctggcagcgcagcctgccaggtggcagccagaatccacagcaggcggtactcccccggcgcagaacgacagcgtga

SEQ ID NO: 940 - DNA, 1764 bp, Shigella flexneri
atgaaacctgcccacaatccttcttttttccgctccttttgtggtttaggatgtatatcccgtttatccgtagaagagcaaaatatcacggattatcaccgcatctgggataactgggccaaggaaggtgctgcaacagaagaccgaacacaggcagttcgattactgaaaatatgtctggcttttcaagagccagccctcaatttaagtttactcagattacgctctctcccatacctgcccccgcacatacaagaacttaacatctctagcaatgagctacgctctctgccagaactccctccgtccttaactgtacttaaagccagcgataacagactgagcaggctcccggctcttccgcctcacctggtcgctcttgatgtttcacttaacagagttttaacatgtttgccttctcttccatcttccttgcagtcactctcagcccttctcaatagcctggagacgctacctgatcttcccccggctctacaaaaactttctgttggcaacaaccagcttactgccttaccagaattaccatgtgaactacaggaactaagtgcttttgataacagattacaagagctaccgccccttcctcaaaatctgaggcttttaaacgttggggaaaaccaactacacagactgcccgaacttccacaacgtctgcaatcactatatatccctaacaatcagctgaacacattgccagacagtatcatgaatctgcacatttatgcagatgttaatatttataacaatccattgtcgactcgcactctgcaagccctgcaaagattaacctcttcgccggactaccacggcccacggatttacttctccatgagtgacggacaacagaatacactccatcgccccctggctgatgccgtgacagcatggttcccggaaaacaaacaatctgatgtatcacagatatggcatgcttttgaacatgaagagcatgccaacaccttttccgcgttccttgaccgcctttccgataccgtctctgcacgcaatacctccggattccgtgaacaggtcgctgcatggctggaaaaactcagtgcctctgcggagcttcgacagcagtctttcgctgttgctgctgatgccactgagagctgtgaggaccgtgtcgcgctcacatggaacaatctccggaaaaccctcctggtccatcaggcatcagaaggccttttcgataatgataccggcgctctgctctccctgggcagggaaatgttccgcctcgaaattctggaggacattgcccgggataaagtcagaactctccattttgtggatgagatagaagtctacctggccttccagaccatgctcgcagagaaacttcagctctctactgccgtgaaggaaatgcgtttctatggcgtgtcgggagtgacagcaaatgacctccgcactgccgaagccatggtcagaagccgtgaagagaatgaatttacggactggttctccctctggggaccatggcatgctgtactgaagcgtacggaagctgaccgctgggcgctggcagaagagcagaaatatgagatgctggagaatgagtaccctcagagggtggctgaccggctgaaagcatcaggtctgagcggtgatgcggatgcggagagggaagccggtgcacaggtgatgcgtgagactgaacagcagatttaccgtcagctgactgacgaggtactggccctgcgattgcctgaaaacggctcacaactgcaccattcataa

SEQ ID NO: 941 - DNA, 1752 bp, Shigella flexneri
gtgacgaggcaggacatgaatgatgccgttatcacgctgaacggcctggaaaaacgctttccgggcatggacaagcccgccgtcgcgccgctcgattgtaccattcacgccggttatgtgacggggttggtggggccggacggtgcaggtaaaaccacactgatgcggatgttggcgggattactgaaacccgacagcggcagtgccacggtgattggctttgatccgatcaaaaacgacggcgcgctgcacgccgtgctcggctatatgccgcagaaatttggtctgtatgaagatctcacggtgatggagaacctcaatctgtacgcggatttgcgcagcgtcaccggcgaggcacgtaagcaaacttttgctcgcctgctggagtttacgtctcttgggccgtttaccggacgcctggcgggcaagctctccggtgggatgaaacaaaaactcggcctggcctgtaccctggtgggcgaaccgaaagtgttgctgctcgatgaacccggcgtcggcgttgaccctatctcacggcgcgaactgtggcagatggtgcatgagctggcgggcgaagggatgttaatcctctggagtacctcgtatctcgacgaagccgagcagtgccgtgacgtgttactgatgaacgaaggcgagttgctgtatcagggagaaccaaaagccctgacacaaaccatggccggacgcagctttctgatgaccagtccacacgagggcaaccgcaaactgttgcaacgcgccttgaaactgccgcaggtcagcgatggcatgattcaggggaaatcggtacgtctgatcctcaaaaaagaggccacaccagacgatattcgccatgccgacgggatgccggaaatcaacatcaacgaaactacgccgcgttttgaagatgcgtttattgatttgctgggcggtgccggaacctcagaatcgccgctgggtgcaatattgcatacggtagaaggcacacccggcgagacggtgatcgaagcgaaagaactgaccaagaaatttggtgattttgccgccaccgatcacgtcaactttgccgttaaacgtggggagatttttggtttgctggggccaaacggcgcgggtaaatcgaccacctttaagatgatgtgcggtttgctggtgccgacttccggccaggcgctggtgctggggatggatctgaaagagagttccggtaaagcgcgccagcatctcggctatatggcgcaaaaattttcgctctacggcaacctgacggtcgaacagaatttacgctttttctctggtgtgtatggcttacgcggtcgggcgcagaacgaaaaaatctcccgtatgagcgaggcatttggcctgaaaagtattgcctcacacgccaccgatgaactgccattaggttttaaacagcggctggcgctggcctgttcgctgatgcatgaaccggatattctctttctcgacgaaccgacttccggcgttgaccccctcacccgccgtgaattttggctgcacatcaacagcatggtagagaaaggcgtcacggtgatggtcaccacccactttatggatgaagcggaatattgcgaccgcatcggcctggtgtaccgtgggaaattaatcgccagcggtacgccggacgatttgaaagcacagtcagctaacgatgagcaacccgatcccaccatggagcaagcctttattcagttgatccacgactgggataaggagcatagcaatgagtaa

SEQ ID NO: 942 - DNA, 522 bp, Shigella flexneri
gtggttatgaaaaaaattgcatgtctttcagcactggccgcagttctggctttcaccgcaggtacttccgtagctgcgacttctaccgtaactggcggttacgcacagagcgacgctcagggccaaatgaacaaaatgggcggtttcaacctgaaataccgctatgaagaagacaacagcccgctgggtgtgatcggttctttcacttacaccgagaaaagccgtactgcaagctctggtgactacaacaaaaaccagtactacggcatcactgctggtccggcttaccgcattaacgactgggcaagcatctacggtgtagtgggtgtgggttatggtaaattccagaccactgaatacccgacctacaaacacgacaccagcgactacggtttctcctacggtgctggtctgcagttcaacccgatggaaaacgttgctctggacttctcttacgagcagagccgtattcgtagcgttgacgtaggcacctggattgccggtgttggttaccgcttctaa

SEQ ID NO: 943 - DNA, 732 bp, Shigella flexneri
atgaaaaaagttctgattgccgcgttaattgcaggttttagtctttccgccacagctgccgaaaccattcgttttgctaccgaagccccctatcctccgtttgaatcgattgatgcaaacaaccagatcgttggttttgacgtcgacctggcgcaggcactgtgtaaagagattgatgcaacctgtactttctctaaccaggcgtttgacagcctgatcccaagcctgaaattccgtcgcgtagaagcagtgatggcgggcatggatatcactccggagcgtgaaaagcaggtactgtttactaccccgtactatgacaactctgccctgtttgtgggtcagcaaggcaaatacaccagtgttgatcagctgaaaggcaaaaaagtcggcgttcagaacgggacgacacaccagaagttcattatggataagcacccggaaatcaccaccgttccgtatgacagctaccagaacgcaaaactggatctgcaaaacgggcgtatcgacagcgtatttggtgacaccgcagtggtcactgagtggctgaaagataacccaaaactggcggcagtgggcgataaagtgaccgataaagattatttcggtactggcctcggcatcgcggtacgtcagggaaacactgaactgcagcagaaactcaacactgcgctggaaaaagtgaagaaagatggcacttacgaaaccatctacaacaaatggttccagaagtaa

SEQ ID NO: 944 - DNA, 2097 bp, Shigella flexneri
atgaagaagaattcttatcttttaagctgcctggccattgccgtctccagtgcctgtcatgctgaagtattaacctacccggatccgctgggttcgtcgcaatcagactttggcggcacaggattgttgcagatgccaaatgcgcgcatcgcaccggaaggtgaattcagcgtcaactaccgggataacgatcaataccggttctactccacctccgtggcgctgttcccatggctggaaggcaccattcgttatacggatgtgcgcacacgcaaatatagccagtgggaagatttcagcggcgatcagtcatacaaagacaaatcattcgattttaaacttcgcctgtgggaagaaggttactggctaccgcaagtggcgtttggtaaacgtgatattgctggtacgggtttgtttgacggtgaatatctggtggccagcaagcaagcggggccatttgatttcaccctcgggatggcatggggctacgccggtaatgcgggcaatattaccaacccgttttgccgggtgagcgataaatattgtcatcgcgcagagtctcacgatgcgggcgatatcagctttagcgatatctttcgtggcccggcttccatctttggcggcattgagtatcaaacgccgtggaatcccctgcgtctgaaactcgaatacgacggcaacaattaccagaatgatttcgctggcaaactgcctcaggcaagccatttcaacgtcggtgcagtttatcgcgctgccagctgggcagacctcaacctcagttatgaacgcggaaacacgttgatgtttggtttcactttacggaccaatttcaacgatctgcgccctgccctacgcgatacgccaaaaccggcctggcagcctgcgccagagtctgaaggtttgcagtacaccacggtagcaaaccaacttaccgccctgaagtataacgcgggctttgacgcgccagaaattcagctacgcgataagacgctgtatatgtctggtcagcaatacaaataccgtgactctcgcgaagcggtcgatcgtgccaaccggattctggtgaataacctgccgcaaggcgttgagaagattagcgtgacgcaaaagcgcgagcatatggcgatggtgactaccgaaaccgacgtagccagcctgcgcaaacagctggccggcacagcgcctggtaaatcagagcaactgcaacaacaacgtgttgaagcagaagatctttctgcctttggtcggtgctaccgtattcgtgaagatcgctttagctactctttcaacccaacactttcacagtcgctgggcggcccggaagatttctatatgttccagctggggctgatgtccagcgcccgctactggtttaccgaccacctgctgcttgatgacggtattttcaccaatatttacaacaactacgacaagtttaagtcttcactgttacccgcggactctaccctgccccgcgtgcgcacgcatatccgtgattacgttcgcaatgacgtttatctcaacaacttgcaagcgaattactttgccgacttaggcaatggtttctatggccaggtgtatggcggttatctggaaacgatgtatgccggtgtcggttccgagcttctttatcgcccgctagatgccagctgggcgctgggtgtggacgttaactacgtgaagcagcgtgactgggacaacatgatgcgcttcaccgattattccacgcccacaggtttcgtgacggcttactggaacccgccgacgctcaatggcgtactgatgaaacttagcgttgggcaatatctggcaaaagataaaggcgcaacgatcgacgtcgccaaactctttgacagcggcgtggcggtaggggtatgggcggcaatcagtaacgtatctaaagatgactacggcgaaggcggctttagtaaaggtttttatatctcgattccgttcgacttgatgaccattggacctaaccgcaaccgcgcggtggtttcgtggacaccattgacgcgtgatggtggacaaatgctgtcacgcaaataccagctcgatccaatgacggcagagcgagaagtaccggttggacaataa

SEQ ID NO: 945 - DNA, 711 bp, Shigella flexneri
ttgatgacgaaacgctggctctctgggacgccccggtccacaccccggcccttaactggggtaaataaggagaaagcaatgtcactgagcagaactcaaattgttaactggctcactcgttgtggcgatattttcaacaccgagagcgagtatcttaccgggctggatcgcgagattggcgacgctgaccacgggctaaatatgaaccgaggctttagcaaagtggtggaaaaactccctgctatcgcagataaagatatcggtttcattctcaaaaataccggtatgacgctgctttccagcgtcggtggtgccagtggtccgctgttcggtaccttctttatccgcgccgcacaggcgacccaggcacggcaaagcctgacactggaagagctttatcagatgttccgcgatggcgcggacggcgtaatcagtcgcgggaaagccgaacctggcgataaaaccatgtgtgatgtgtgggtgccggtggtggaatcgttacgtcagtccagcgagcaaaatctctctgttccggtggcgctcgaagctgccagtagcatcgccgaatccgctgcacaaagtacgattacgatgcaagcccgcaaaggccgcgccagttatctcggtgaacgcagtattggtcaccaggatcccggcgcgacctcggtgatgtttatgatgcaaatgttggcgttagccgcaaaagagtaa

SEQ ID NO: 946 - DNA, 1716 bp, Shigella flexneri
atgtccatcatgttaccgataaataataacttttcattgtcccaaaattctttttataacactatttccggtacatatgctgattacttttcagcatgggataaatgggaaaaacaagcgctccccggtgaaaatcggaatgaagcggtctccctacttaaagaatgtctcatcaatcagttcagtgagcttcaactgaatcgtttaaatctgtcctcgctacctgacaacttaccacctcaaatcactgttctggaaattactcagaatgccctaatatcattaccagaattgccagcatcgctggaataccttgacgcctgtgacaatcgcctgtcaacacttcctgaattacccgcatctctgaaacatcttgatgtagataacaaccaactaaccatgcttcctgaattgcctgcattgctggaatatattaatgcagataacaatcagctaaccatgcttcctgaattacctacatcgctggaagtgctctcagtaagaaataaccagctgacatttctccctgagttacctgaatcactggaagcgctcgatgtaagtactaatcttctggaaagcctaccagccgtacctgtaagaaatcatcactcagaggaaaccgagatatttttccggtgccgcgagaatcgcatcacacacattccggaaaatatacttagccttgatccgacctgcactatcatcctcgaagacaatcctctgtcctcacggatcagggagtctctgtcgcaacaaaccgcccaaccggactaccacggcccacggatttacttctccatgagtgacggacaacagaatacactccatcgccccctggctgatgccgtgacagcatggttcccggaaaacaaacaatctgatgtatcacagatatggcatgcttttgaacatgaagagcacgccaacaccttttccgcgttccttgaccgcctttccgataccgtctctgcacgcaatacctccggattccgtgaacaggtcgctgcatggctggaaaaactcagtacctctgcagagcttcgacagcagtctttcgctgttgctgctgatgccactgaaagctgtgaggaccgtgtcgcgctcacatggaacaatctccggaaaaccctcctggtccatcaggcatcagaaggccttttcgataatgataccggcgctctgctctccctgggcagggaaatgttccgcctcgaaattctggaggatattgcccgggataaagtcagaactctccattttgtggatgagatagaagtctacctggccttccagaccatgctcgcagagaaacttcagctctccactgccgtgaaggaaatgcgtttctatggcgtgtcgggagtgacagcaaatgacctccgcactgccgaagccatggtcagaagccgtgaagagaatgaatttacggactggttctccctctggggaccatggcatgctgtactgaagcgtacggaagctgaccgctgggcgcaggcagaagagcagaaatatgagatgctggagaatgagtactctcagagggtggctgaccggctgaaagcatcaggtctgagcggtgatgcggatgcggagagggaagccggtgcacaggtgatgcgtgagactgaacagcagatttaccgtcaagtgactgacgaggtactggccctgcgattgtctgaaaacggctcacaactgcaccattcataa

SEQ ID NO: 947 - DNA, 1167 bp, Shigella flexneri
gtgatccagtttcgcgtggtatgggttgatgatcgcaaccagatacaggtcaaccgtgcatggcgtgtgcagttcagctctgccatcggcccgtacaaaggcggtatgcgcttccatccgtcagttaacctttccattctcaaattcctcggctttgaacaaaccttcaaaaatgccctgactaccctgccgatgggcggtggtaaaggcggcagcgatttcgatccgaaaggaaaaagcgaaggtaaagtgatgcgtttttgccagacgctgatgactgaactgtatcgccacctgggcgcggataccgacgttccggcaggtgatatcggcgttggtggtcgtgaagtcggctttatggcggggatgatgaaaaagctctccaacaataccgcctgcgtcttcaccggtaagggcctttcatttggcggtagtcttattcgcccggaagctaccggctacggtctggtttatttcacagaagcaatgttaaaacgccacggtatgggttttgaagggatgagcgtttccgtttctggctccggcaacgtcgcccagtacgctatcgaaaaagcgatggaatttggtgctcgtgtgatcactgcgtcagactccagcggcactgtagttgatgaaagcggattcacgaaagagaaactggcacgtcttatcgaaatcaaagccagccgcgatggtcgagcggcagattacgccaaagaatttggtctggtctatctcgaaggccaacagccgtggtctgtaccggttgatatcgccctgccttgcgccacccagaacgaactggatgttgacgccgcgcatcagcttatcgccaatggcgttaaagccgtcgctgaaggggcaaatatgccgaccaccatcgaagcgactgaactgttccagcaggcaggcgtactgtttgcaccgggtaaagcggctaatgctggcggtgtagcaacgtcgggcctggaaatggcacaaaacgctgcgcgcctgggctggaaagccgagaaagttgacgcacgtttgcatcacatcatgctggatatccaccatgcctgtgttgagcatggtggtgaaggtgagcaaaccaactacgtgcagggcgcgaacattgccggttttgtgaaggttgccgatgcgatgctggcgcagggtgtgatttaa

SEQ ID NO: 948 - DNA, 1635 bp, Shigella flexneri
atgtcggttagagggaaacttatgaagcactctgtttcagttacgtgttgtgcgctgttggtcagcagcatttctctttcgtatgctgcagaagttccgagcggcacagtactggcagagaagcaggagctggtgcgccacattaaagatgagcctgcgtcgctggatcccgctaaagccgtgggcctgccagagattcaggtcattcgcgatctgtttgaaggtctggtgaatcagaacgaaaaaggggagattgtccccggcgtcgcgactcaatggaaaagtaatgacaaccgtatctggacttttaccctgcgcgataacgcaaaatgggcggatggcacaccggtaacggcgcaagattttgtctacagctggcaacgtctggtggacccaaaaacattgtcgccatttgcatggtttgccgcgctggcgggaatcaacaacgcacaggcgattattgatggtaaagctacgcctgatcagcttggcgtcaccgcagttgatgcccatactttgaaaattcagcttgataaaccgttgccgtggtttgtgaatttaaccgctaactttgccttcttcccggtgcaaaaagccaacgtagaaagcggtaaagagtggacgaaacccggaaatctgatcggcaatggcgcttatgttcttaaagagcgcgtagtcaatgaaaaactggtcgtggtaccgaatacccattattgggataacgccaaaacggtgctgcaaaaagtgaccttcctgccaattaatcaggaatccgcagccactaagcgttacctcgcgggggatattgatatcaccgaatccttcccgaaaaatatgtatcagaagctgttgaaggatattccggggcaggtttatacgccaccgcagctcgggacctattattatgcctttaacacgcaaaaagggccgacggcagatcagcgcgttcgcctggcattaagtatgacgatagatcgccgcctgatgaccgaaaaagtgttggggacgggcgaaaagccagcgtggcattttataccagatgttaccgccggatttacgccggaaccttcgccgtttgaacaaatgagtcaggaagaactgaatgcgcaggcaaaaactttgttgagcgcagctggttatggtccgcaaaaaccgctgaagctgacgcttttgtataacacttcagaaaaccatcaaaaaattgcgattgctgtagcatcgatgtggaaaaagaaccttggcgtagatgttaaattgcaaaatcaggaatggaaaacctatatcgatagccgtaacaccggcaattttgatgttatccgcgcctcatgggtgggggattataatgaaccctccactttcctgacattattaacgtcaatgcattcaggaaatatttcacgctttaacaatccggcatacgacaaagttctggcccaggcatcgacggaaaataccgttaaagcgcgtaatgccgattacaacgcggcagaaaaaatcctcatggagcaagcaccgattgcaccaatttatcaatataccaatggacgattaatcaaaccgtggctgaaaggttatcccattaataaccctgaagatgtagcgtacagtcggactatgtatattgtgaagcattga

SEQ ID NO: 949 - DNA, 1752 bp, Shigella flexneri
atgctcccgacaaataacaatcacagattaatttcaaattcgttctccacttattcaatcgacactagccgcgcatatgaaaattatctaacccattggactgaatggaaaaataaccgcatacaagaagaacaacgagacatcgcttttcagcgactagtatcatgtctacaaaaccaagagacgaacctggacttgtctgaattaggcctgacaacattacctgaaatccccccgggaattaaatcaattaatataagtaaaaataatttaagcttaatctccccattgcctgcgtcccttacacaacttaatgtcagctataacagacttattgaactgcctgctttgcctcaaggacttaaattattgaatgcgtcccacaatcaactaatcacactacccacactccccatatctttgaaggagcttcatgtctcaaataatcaattatgttctcttcctgttttaccagaactactggaaacattagatgtatcatgtaatgggctggcagttttaccacctttaccattttctttacaagagattagcgcaatagggaatcttcttagtgaactcccccctctacctcacaacattcactccatatgggcaatcgacaatatgttaaccgatattccatacctgccggaaaatttaaggaacggttattttgacataaatcagataagtcatatcccggaaagcattcttaatctgaggaatgaatgttcaatagatattagtgataacccattgtcatcccatgctctgcaatccctgcaaagattaacatcttcgccggactaccacggcccgcagatttacttctccatgagtgacggacaacagaatacactccatcgccccctggctgatgccgtgacagcatggttcccggaaaacaaacaatctgatgtatcacagatatggcatgcttttgaacatgaagagcacgccaacaccttttccgcgttccttgaccgcctttccgataccgtctctgcacgcaatacctccggattccgtgaacaggtcgctgcatggctggaaaaactcagtgcctctgcggagcttcgacagcagtctttcgctgttgctgctgatgccactgaaagctgtgaggaccgtgtcgcgctcacatggaacaatctccggaaaaccctcctggtccatcaggcatctgaaggccttttcgataatgataccggcgctctgctctccctgggcagggaaatgttccgcctcgaaattctggaggacattgcccgggataaagtcagaactctccattttgtggatgagatagaagtctacctggccttccagaccatgctcgcagagaaacttcagctctccactgccgtgaaggaaatgcgtttctatggcgtgtcgggagtgacagcaaatgacctccgcactgccgaagccatggtcagaagccgtgaagagaatgaatttacggactggttctccctctggggaccatggcatgctgtactgaagcgtacggaagctgaccgctgggcgctggcagaagagcagaaatatgagatgctggagaatgagtaccctcagagggtggctgaccggctgaaagcatcaggtctgagcggtgatgcggatgcggagagggaagccggtgcacaggtgatgcgtgagactgaacagcagatttaccgtcagctgactgacgaggtactggccctgcgattgcctgaaaacggctcacaactgcaccattcataa

SEQ ID NO: 950 - DNA, 3042 bp, Shigella flexneri
atggaccagatagccaacctggtcattgatttggggattgatgcggcagagtttaaaaatgaaattccccgtatcaaaaaccttctgaatggtgcagccagcgatgcagaacggtcttctgcccgtatgcagcgttttatggagcgtcagactcaggcggcccggcagacaatgcaggcggcttcttcggctgcaacagcagcatcagcccatgcgcagacggtggagaagaatgcacgggctcatgaacgcatggcccgtgaggtggaacaaacccgtctgcgcgtggatgccctgaatcagaaaatgcgcgaggaacaggcgcaggccagggcactggcggaggcgcaggataaagcggctgccgccttttatcgccagattgacagtgtgaaacaggccggtgcggggcttcaggaattacagcgtattcagcagcagatccgacaggccagaaacagtggcggggttggtcagcaggattatctggcgctgatttcggagatcacggcgaaaacccgtgccctgacgcaggcagaggaacaggccacccggcagaaagcggcgtttatccgccagcttaaagagcaggcaacccgccagaatctgtcgtcttctgagttgcttcgcgccagggcggctcagctgggggtaagcagtgctgcagaagtgtatatccgcaaaatggagcgggcaggaaaagccacacattcgctggggctgaaaagtgcggcagcccggcgggagctgggggtgttaatcagtcagatggcgcgaggcaattttggtgcgctgaggggatccgggataacgctggctaaccgtgccggatggacaggcgcactgatgtcgccgaaaggcatgatgactggcggcgttattggcggacttgtcgcggcggtcctgggtctgggtaaagcctggcatgacggccggaaggagggcgagaaatttaaccgtcagctggcgctgacgggacattatgccggtgtcactgtcgggcagttgtggaaactcagccgggccatatccgggaatggtatcacgcaacatgcggcagccggtgcgctggcacaggtggtgggcagtggggcatttcatggaaacgatattggtatggtggcgaaagctgccgcacagatggagcgatcggttggccagtcggtcagcgataccataaatcagtttaagcggctgaaggatgatcctgtaaatgccgcgaaggcgctggacaatgcgctgcattttttgaatgccactcagcttgagcagatacgcgtccttggggagcaggggcggtccagtgatgcggcccggatcgccatgtctgcgctggcagaggaaaccggtaaacgcacatctgatattgataataatctcaatgcgctgggtagtacgctgcaaaccttgtctgactggtggaagcagttctgggatgcggccatgaatattggtcgtgaagactcgctggatgcgcagattgatgcgttacaggaaaaaattcagcgcgcgaaaaaatatccgtggacaaacgcctccacacaggtggagtacgatcagcagcgtcttaacgatcttcaggagaaaaaacgccggaaggatttgcaggatgcaaaagcgcaggcagaacggaattaccaggagcaacagaaacgccggaatgctgaaaatgccgcgctgaaccggatgaatgaaacggaagctgcacgacatcagcgggaaattgcgcgtattaatgccatgcagtacgccgaccaggctgtcagggatgcggcgatacagcgtgaaaatgaacgttacgaaaaagccattaagaaaaatacacgggcaacccgtaatgatgaggccacccggttattgctgcagtacagtcagcagcaggcacaggtggaagggcagattgctgctgccagacagtcagcaggcattgccactgaaaggatgactgaagcgcataaacagcttctggccctgcagcagcgcatcagcgacctggacgggaaaaagctgacggcagatgaaaagagtgtgctggcccgtaagaatgagctgattcaggcgctgacgctgctggatgtgaaacagcaggagctgcagaaacagacagcgcttaacgacctgagaaaaaaaacggttcagctgaccagccagctggcagacaaagaacgtgcactgcgtgagcagcacaatctggatattgccactgcaggtatgggggataagcagcggcagcgctaccaggcacagttgcgcatccggcaggaataccggcaacagttgcaacagcttgagaatgacagtcgccagaaaggcacttacgggacggaggactaccggagggctgaggaggtgctgaaggggagcctgaagcgacaactgaatgaaaacaaacgctactggcaggaactggaagtggcgcagggcgactggaaaaacggtgccatgcgggcgtttcagaattttacggcggatgcggataatgcggcgggaacggcagaacagatgtttacagtggcattcagcagtgccggtaatgcactggcgacattctgtaccaccggtaagctgaattttaaatccttcacctcttccctgttgtcagatatggccagaattatggcacagatggccatgatgcaggcggtaaagggcgtcggttctttattcggcttcacgactaatgctgatggcggtgtttaccagtctgctgatttgagtcgctacagtggcacggtggttaaccgtccgacgttttttgcttttgcaaaaggcgcgggtgtgatgggggaagcgggacctgaagccattctgccactgcgtcgcggtgctgatggtaagctgggggttgtggcggatactggtggttcaggcatggtgatgtttgccccgcagtacaacattgagatcaataacgacggcacgaacgggcagataggtccggctgccctgaaggtggtttatgacctcgggaaaaaagcggccgcggactttatgcaacagcaggcccgtgatggtggccggttaagtggagcataccggtaa

SEQ ID NO: 951 - DNA, 1653 bp, Shigella flexneri
atggcacaagtcattaataccaacagcctctcgctgatcactcaaaataatatcaacaagaaccagtctgcgctgtcgagttctatcgagcgtctgtcttctggcttgcgtattaacagcgcgaaggatgacgccgcgggtcaggcgattgctaaccgttttacttctaacattaaaggcctgactcaggctgcacgtaacgccaacgacggtatttctgttgcacagaccactgaaggcgcgctgtccgaaatcaacaacaacttacagcgtatccgtgagctgacggttcaggcttctaccgggactaactctgattcggatctggactccattcaggacgaaatcaaatcccgtctcgacgaaattgaccgcgtatccggtcagacccagttcaacggcgtgaacgtactggcaaaagacggttcgatgaaaattcaggttggtgcgaatgacggccagactatcactattgatctgaagaaaattgactctgatacgctggggctgaatgggtttaatgtgaatggtggcggggctgtggctaatactgctgcatctaaagctgacttggtagctgctaatgcaacagtggtcggcaacaaatatactgtgagtgcgggttacgatgctgctaaagcgtctgatttgctggctggagttagtgatggtgatactgttcaggcaaccattaataacggcttcggaacggcggctagtgcaacgaattacaagtatgacagtgcaagtaagtcatactcttttgataccacaacggcttcagctgccgatgttcagaaatatttgaccccgggagttggtgataccgctaagggcactattactatcgatggttctgcacaggatgttcagatcagcagtgatggtaaaattacggcaagcaatggagataaactctacattgatacaactgggcgcttaacgaaaaacggctctggtgcttctttgactgaggctagtctgtccacacttgcagccaataataccaaagcgacaaccattgacattggcggtacctctatctcctttaccggtaatagtactacgccggacactattacttattcagtaacaggtgcaaaagttgatcaggcagctttcgataaagctgtatcaacctcgggaaacaatgttgatttcactactgcaggttatagcgtcaacggcacaactggcgctgtaacaaaaggtgttgattcggtttatgttgataacaacgaggcgttgaccacatctgatactgtagatttttacctacaggatgatggttcagtgactaacggcagcggtaaggcagtttataaagatgctgatggtaaattgacgacagatgctgaaacaaaagcagctacgacagccgatcccctgaaagctctggatgaagccatcagctccatcgacaaattccgctcctccctgggtgcggtgcaaaaccgtttggattccgcagtcaccaacctgaacaacaccactaccaacctgtctgaagcgcagtcccgtattcaggacgccgactatgcgaccgaagtgtccaacatgtcgaaagcgcagattatccagcaggccggtaactccgtgctggcaaaagccaaccaggtaccgcagcaggttctgtctctgctgcagggttaa

SEQ ID NO: 952 - DNA, 2487 bp, Shigella flexneri
atgaaactcagtcgtcgtagctttatgaaagctaacgccgttgcggccgctgcggcggctgccggtctcagcgtgccgggcgttgcccgcgccgttgttggtcagcaggaagccattaaatgggataaagcgccgtgccgtttctgcggtactggttgcggcgttctggtcggaacgcagcaggggcgtgtggtggcctgtcagggcgacccggacgcaccggttaaccgtggcctgaactgcattaagggctatttcctgcccaagatcatgtacggtaaagaccgtttgacgcagccgctgctgcgtatgaaaaacggtaaatatgacaaagaaggcgaatttaccccaatcacctgggatcaggccttcgatgtgatggaagagaaattcaaaaccgccctgaaagaaaaagggccggaatcgatcggtatgttcggttctggtcagtggactatctgggaaggttatgccgcgtccaagctgttcaaagcgggcttccgttcgaacaacatcgacccgaacgcacgtcactgtatggcgtcggcagtagttggctttatgcgtacctttggtatggatgagccgatgggctgctatgacgacatcgagcaggctgacgcgtttgtgctgtggggcgctaacatggcggagatgcacccgatcctctggtcacgcatcactaacagtcgtctctctaaccagaacgtcaccgtggcggtgctttctacctaccagcatcgtagcttcgagctggcggataacggcatcatctttacgccgcaatctgacctggtgatcctgaactacatcgccaactatatcattcaaaacaatgcgataaatcaggacttcttcagcaagcacgttaacctgcgcaaaggggcgacggacatcggctacggtttacgtccgacccatccgctggaaaaagcagcgaagaatccgggttctgacgcctccgaaccgatgagctttgaagattacaaagccttcgttgctgagtatacgctggaaaaaaccgctgaaatgaccggcgtgccgaaagaccagttagaacaactggcgcagctgtatgccgatccgaacaagaaagtcatctcctactggacgatgggcttcaaccagcatacccgtggtgtgtgggctaacaacctggtctacaacctgcacctgctgaccggcaaaatttcccagccgggttgcggtccgttctccctgaccgggcaaccttctgcgtgtggtactgcgcgtgaagtgggcacctttgctcaccgtctgcctgcggacatggtggtaactaacgagaaacatcgtgatatctgtgagaagaagtggaatatcccgagcggcaccattccggcgaaaatcggtcttcatgcggtggcacaagaccgtgcgctgaaagacggcaagctgaatgtttactggaccatgtgtaccaacaacatgcaggccgggccgaacatcaatgaagagcgtatgccgggctggcgcgatccgcgcaacttcatcatcgtctccgatccgtatccgacagtcagtgcgctggccgccgacttgatcctgccgaccgcaatgtgggtagagaaagagggcgcttacggtaacgccgaacgccgtactcagttctggcgtcagcaggtacaggcgccaggcgaagcgaaatcggatctctggcagttagtccagttctcccgccgcttcaaaactgaagaagtatggccggaagagctgctggcgaagaaaccggaactgcgtggcaaaacgctgtacgaagttctgtatgccacccccgaagtgagcaaattcccggtatccgaactggcggaagatcagctgaacgatgaatcccgcgagctgggcttctatctgcaaaaagggctgttcgaagagtacgcatggtttggtcgcggtcacggtcacgatctggcaccgttcgatgactaccacaaagcgcgcggtctgcgctggccggtggtgaatggtaaagaaacacagtggcgttacagcgaaggtaacgacccgtacgtgaaagcgggcgaaggctataagttctacggtaaaccggatggcaaagcggtgatcttcgcactgccgttcgaaccggcggcggaagcaccggatgaagagtacgacctgtggctctctaccggacgcgttctggagcactggcacaccggcagtatgactcgccgtgtgccggaactgcaccgcgccttcccggaagcggtcttgtttattcacccgctggatgcgaaagcgcgcgatctgcgccgtggcgacaaagtgaaagtggtttctcgccgtggcgaagtgatctcgattgttgaaacgcgcggtcgtaaccgtccgccacagggcctggtgtacatgccgttcttcgacgccgcacagctggttaacaaactgacgctggatgcgaccgatccgctctcgaaagagacggacttcaagaagtgcgcggtcaaactggagaaggtgtaa

SEQ ID NO: 953 - DNA, 1140 bp, Shigella flexneri
atgtcagaatttttgcctttttcgcgaccagcaatgggcgtggaggaactcgctgcagttaaagaggttctcgaatccggttggatcacaaccggtccgaagaatcaggcgcttgagcaagccttttgccagttgacgggaaatcagcatgccatcgcggtcagttcagccaccgccggaatgcatatcacgctaatggcgttggaaattggcaagggcgatgaagtgattacgccttccctgacctgggtttcaaccctcaatatgatttccttgctgggtgcaacgccggtaatggtggatgtcgaccgcgatacgctgatggtcacgcctgaagcgatcgaatcagccattacgccacgcactaaagccatcattccggtgcattatgccggtgcgccagcagatattgacgccattcgcgccattggcgaacgttacggcatcgcagttatcgaagatgctgcccatgccgtcggtacgtattacaaagggcgacatattggcgcaaaaggtaccgctattttttcatttcatgccattaaaaatattacctgtgctgaaggtggcctgattgtaactgataatgaaaaccttgcccgccagctacggatgctgaaatttcacggtctgggtgtcgatgcctatgacagacaaacctggggccgtgcaccgcaggctgaagtcttaacaccgggctataagtacaatctgaccgatattaacgccgcgattgccctgacacagttagtcaaattagagcacctcaacacccgtcggcgcgaaattgcccagcaatatcagcaagcactggcagctctcccctttcagccattaagccttcccgcctggccgcacgttcacgcctggcatctgtttattattcgtgtcgatgaacaacgttgtggtatcagtcgcgatgcgttgatggaagcgttaaaagaaagaggcattggtaccgggttacatttccgcgccgctcacacacaaaaatattatcgcgagcgttttcccacgctgtcgttaccgaataccgaatggaatagcgaacgcatctgttcgttgccgctgttcccggatatgactaccgccgatgccgaccgcgtcatcacagcccttcagcaactcgcaggacaataa

SEQ ID NO: 954 - DNA, 1068 bp, Shigella flexneri
atggttacgttttggggaaattatgaggggatctctcagagcgcagcttacccagaatccatcaatgaaaataacaatgatgaaattaatggattagtacaagagttcaaaaacctttttaatggtaaggaaggaataagcacctgtattaaacatctacttgagcttataaaaaacgccatacgagtaaacgacgatccttatagatctaatattaataattcctcagttacttatattgatattggctccaatgatacagaccatattactattggtatcgacaaccaagaaccaatagaattacctgcgaactataaagacaaagaactcgtccgtactatcattaatgacaacatagttgagaagactcatgatatcaataacaaggaaatgatcttcagcgcattaaaagaaatatatgatggagatcctggttttatcttcgataagatatcacacaaactcagacatacggtaacggaatttgatgagagcgggaaaagcgaaccaacggacttatttacctggtacggtaaagataaaaaaggcgactctctcgctattgtaattaaaaataaaaacggaaatgattacttatctctcggttactacgatcaggacgactaccacattcaaagaggaattcgtattaatggtgatagtctcacccaatattgtagtgaaaacgccaggagtgcttcagcgtggtttgaaagcagtaaagctatcatggcagaatcatttgcaactggttccgatcatcaggttgtaaacgagctcaacggggaaagactgagagaacctaacgaagtttttaaacgtttaggtcgagcaataagatataattttcaagtggacgatgcaaaatttagacgcgataatgtaaaagaaataatttctactttattcgctaacaaagttgacgttgaccatcctgaaaataaatacaaagactttaagaatctcgaagataaagttgaaaaaagacttcaaaatcgccagacgaaatatcaaaatgaaattaatcaactatctgcactaggtgttaattttgatgatatttaa

SEQ ID NO: 955 - DNA, 1812 bp, Shigella flexneri
atgctcagaaacatttcatcctgtttatttccacatatcagcacaattacatcccccaaccattatttgtccgaatgggatgattgggagaaacaggggttaccggaagaacagcgtactgaggcggtaagaagacttcgtgcatgtcttacctctaaggggcataaactggacctgcgagccttggcgctttcctcgctacctgtactccctgcttgcattaaaaagcttgatgtgagctgtaataaattaaccatccttactgatttacctgaaaatattaaagaacttattgcaagagataatttcttaacacatatatctgcattaccacattatctaataactttggatgtgtccgaaaatcaattagagaatctgccgttattaccagacaccatcaaatcactaagcgcagagtataataggttatccacactgccttcattacccttgaatttaaaaaaacttgaggttaggaacaacgaactgcaaactcttccatctctgccttctaatcttaagatacttaaggttgcgcacaaccatcttactgaactgccccctttacctaggagactgcaacttctttttgcatatagcaatagattaagcaacttaccaaacatccaagaaaatattatcatgagaagatttttttattttgaaaacaaccaaataactacaatcccgacaaatctttttcgtttagatcctcatataactattgagattgcaaataaccccttatcagatcaaactctgctattcttaatacagcaaacttcggttccaaattttaacgggcctcagtttcgtatttccctgtcagaccaaaacagactgtttttacgccagatgttgccgcaaaatttacattcgcgccatatcagagtcatcactgaaggggggcagaactttcagatcccccctcttcccgaaactgtggcagcctggtttcctgaagcagatcgtcgggaggtttctacacaatggacttctttttccaccgaggagaattcccgggcattctccgcgttccttgaccgcctttccgataccgtctctgcacgcaatacctccggattccgtgaacaggtcgctgcatggctggaaaaactcagtgcctctgcggagcttcgacagcagtctttcgctgttgctgctgatgccactgagagctgtgaggaccgtgtcgcgctcacatggaacaatctccggaaaaccctcctggtccatcaggcatcagaaggccttttcgataatgataccggcgctctgctctccctgggcagggaaatgttccgcctcgaaattctggaggacattgcccgggataaagtcagaactctccattttgtggatgagatagaagtctacctggccttccagaccatgctcgcagagaaacttcagctctccactgccgtgaaggaaatgcgtttctatggcgtgtcgggagtgacagcaaatgacctccgcactgccgaagccatggtcagaagccgtgaagagaatgaatttacggactggttctccctctggggaccatggcatgctgtactgaagcgtacggaagctgaccgctgggcgctggcagaagagcagaaatatgagatgctggagaatgagtaccctcagagggtggctgaccggctgaaagcatcaggtctgagcggtgatgcggatgcggagagggaagccggtgcacaggtgatgcgtgagactgaacagcagatttaccgtcagctgactgacgaggtactggccctgcgattgcctgaaaacggctcacaactgcaccattcataa

SEQ ID NO: 956 - DNA, 2235 bp, Shigella flexneri
atggttgcggtaagaagtgcacatatcaataaggctggtgaatttgatccggaaaaatggatcgcaagtctgggtattaccagccagaagtcgtgtgagtgcttagccgaaacctgggcgtattgtctgcaacagacgcaggggcatccggatgccagtctgttattgtggcgtggtgttgagatggtggagatcctctcgacattaagtatggacattgacacgctgcgggcggcgctgctgttccctctggctgatgccaacgtagtcagcgaagatgtgctgcgtgagagcgtcggtaagtcggttgttaaccttattcacggcgtgcgtgatatggcggcgatccgccagctgaaagcgacgcacactgattctgtttcctccgaacaggtcgataacgttcgccggatgttattggcgatggtcgatgattttcgctgcgtagtcatcaaactggcggagcgtattgctcatctgcgcgaagtaaaagatgcgccggaagatgaacgtgtactggcggcaaaagagtgcaccaatatctacgcgccgttggcgaaccgtcttgggattgggcaactgaaatgggagctggaagattactgcttccgttatctccacccgaccgaatacaaacgcatcgcaaaactgctgcatgaacgccgtctcgaccgcgaacactatatcgaagagtttgtcggccatctgcgcgctgagatgaaagctgaaggcgttaaagctgaagtgtatggtcgtccgaaacacatctacagcatctggcgcaaaatgcagaaaaagaacctcgccttcgatgagctgtttgatgtgcgtgcggtacgtattgtcgccgagcgtttacaggattgttatgccgcactggggatagtgcacactcactatcgccacctgccggatgagtttgacgattacgtcgctaacccgaaaccaaacggttatcagtctattcataccgtggttctggggccgggtggaaaaaccgttgagatccaaatccgcaccaaacagatgcatgaagatgcggagttgggtgttgctgcgcactggaaatataaagagggcgcggcagctggcggcgcacgttcgggacatgaagaccggattgcctggctgcgtaaactgattgcgtggcaggaagagatggctgattccggcgaaatgctcgacgaagtacgtagtcaggtgtttgacgaccgggtgtatgtctttacgccgaaaggtgatgtcgttgatttgcctgcgggatcaacgccgctggacttcgcttaccacatccacagtgatgtcggacaccgctgcatcggggcaaaaattggcgggcgcattgtgccgttcacctaccagctgcaaatgggcgaccagattgaaattatcacccagaaacagccgaaccccagccgtgactggttaaacccaaacctcggttacgtcacaaccagccgtgggcgttcgaaaattcacgcctggttccgtaaacaggaccgtgacaaaaacattctggctgggcggcaaatccttgacgacgagctggaacatctggggatcagcctgaaagaagcagaaaaacatctgctgccgcgttacaacttcaatgatgtcgacgagttgctggcggcgattggtggcggggatatccgtctcaatcagatggtgaacttcctgcaatcgcaatttaataagccgagtgccgaagagcaggacgccgccgcgctgaaacagcttcagcaaaaaagctacacaccgcaaaaccgcagtaaagataacggtcgtgtggtggttgaaggtgttggtaacctgatgcaccacatcgcgcgctgctgccagccgattcctggagatgagattgtcggcttcattacccagggacgcggtatttcagtacaccgcgccgattgcgaacaactggcggaactgcgctcccatgcgccagaacgcattgttgacgcggtatggggtgagagctactccgccggatattcgctggtggtccgcgtggtggctaatgatcgtagtgggttgttacgtgatatcacgaccattctcgccaacgagaaggtgaacgtgcttggcgttgccagccgtagcgacaccaaacagcaactggcgaccatcgacatgaccattgagatttacaacctgcaagtgctggggcgcgtgctgggtaaactcaaccaggtgccggatgttatcgacgcgcgtcggttgcacgggagttag

SEQ ID NO: 957 - DNA, 1056 bp, Shigella flexneri
ttgcagccgctgagattttgtcccggacctgtgccaggttatgcgcaatatcgttcattttccgaggatcttagtatgaatatggaagaaattgtggcccttagtgtaaagcataacgtctcggatctacacctgtgcagcgcctggcccgcacgatggcgcattcgtggcagaatggaagctgcgccgtttgatgcgccggacgtcgaagagctactgcgggagtggctggatgacgatcagcgggcaatattgctggaaaatggccagctggattttgccgtgtcgctggcggaaaaccagcggttgcgtggcagtgcgttcgcgcaacggcaaggtatttctctggcattacggttgttaccttcgcactgtccacagctcgaacagcttggtgcaccaccggtattgccggaattactcaagagcgagaatggcctgattctggtgacgggggctacggggagtggcaaatctaccacgctggcggcgatggttggctatcttaatcaacatgccgatgcgcatattctgacgctggaagatcctgtggaatatctctatgccagccagcgatgtttgatccagcagcgggaaattggtttgcactgtatgacgttcgcatcggggttgcgggctgcattgcgggaagatcctgatgtgattttgctcggagagctacgtgacagtgagacaatccgtctggcgctgacggcggcagaaaccgggcatctggtgctggcaaccttacatacacgtggtgccgcgcaggcagttgagcgactggtggattcatttccggcgcaggaaaaagatcccgtacgtaatcaacttgcgggtagtttacgggcagtgctgtcacaaaagctggaagtggataaacaggaaggacgcgtggcgctgtttgaattactgattaacactcccgcggtggggaatttgattcgcgaagggaaaacccaccagttaccgcatgttattcaaaccgggcagaaggtggggatgttaacgtttcagcagagttatcagcagcgggtgggggaagggcgtttgtga

SEQ ID NO: 958 - DNA, 927 bp, Shigella flexneri
atgttgatgactggtaatgcctgggcagatggcgaaccgccaactgaaaatatcttaaaagatcaattcaaaaagcagtatcacggcattctcaagcttgatgccatcagcttaaaaaatcttgatgctaagggtaatcaggccacctggtcagcggaaggcgatgtctcttccagtgacgatctctatacctgggtcggtcagttggcagattacgaactgctcgaacagacctggacgaaagataaaccggtaaaattctcggcgatgttaaccagtaaaggaacgcccgcgtctggctggtcggtgaacttttactcttttcaggcggcagccagcgatcgtgggcgggtggtcgacgatatcaaaacgaataataaatatctgatcgtgaatagcgaagatttcaattatcgctttagtcagcttgaatctgcgttgaatacccagaagaactcgattcctgcgctggaaaaggaagtgaaagcgcttgataagcaaatggtggcggcgcagaaagcagcggatgcatattggggaaaagatgcaaacggtaagcaaatgacccgcgaagaagcctttaaaaaaattcaccaacagcgtgatgagtttaataaacagaacgatagcgaggcgttcgcggttaaatatgacaaagaggtttatcaaccggcgattgcggcatgtcataaacagagtgaagagtgttatgaagtgccgattcagcagaaacgagatttcgatatcaacgaacaacggcgacagacttttctgcaatcacaaaaactcagccgtaaattgcaggatgactgggtaacgctcgaaaaagggcaatatccgttaacgatgaaagtttcagaaataaacagtaaaaaagtcgcgattttgatgaaaattgacgatatcaaccaagctaatgaacgctag

SEQ ID NO: 959 - DNA, 3858 bp, Shigella flexneri
atgaataaaatttattcactgaaatatagtcatattacaggtggattagttgctgtttctgaactgacccggaaagttagtgtcggtacatcaagaaagaaagttatcctcggtattattttatcctcaatatatggaagttatggcgaaacagcatttgcagcaatgctggatataaataatatatggacccgcgattatcttgaccttgctcaaaacagaggagagttcagaccgggtgcaacaaatgttcaattaatgatgaaagatggaaagatatttcattttccagaactacctgtacctgatttttctgctgtttccaacaaaggtgcaacaacatcaattggaggtgcgtacagtgttactgcgactcataacggtacacagcatcatgcaataacaacacagtcatgggatcagacagcatataaagcaagtaacagagtatcatctggcgacttttcggttcatcgtctgaataaattcgtcgtggaaacaacaggggttacggagagtgccgacttctcactttctcccgaagatgcgatgaaaagatatggcgtaaactacaacggtaaggaacaaataattggcttcagagcaggtgccggaacaacctcaacgatattaaacggcaaacaatatctgtttggacaaaactataatcccgacttgttaagcgcaagtctttttaatctggactggaaaaacaagagttacatttataccaacagaaccccttttaaaaactcaccaatttttggcgatagtggttctggttcttatctatatgataaagaacaacaaaaatgggttttccatggtgttaccagtacagttggttttatcagtagtaccaatatagcctggacaaactactcgttatttaataatattctggtaaacaatttaaaaaagaatttcacaaacactatgcagctggatggtaaaaaacaagagttatcatcgattataaaagataaggacctgtctgtctcaggaggaggggtattaacgctcaagcaggataccgatcttggcattggcgggcttatattcgataagaaccagacatataaagtgtacggaaaagataagtcttataaaggtgccgggatagatattgataataataccaccgttgaatggaatgttaagggcgttgccggagataatctgcataaaataggtagtggtactctggatgtaaaaatagcacagggaaataaccttaaaataggtaatgggactgtcatccttagtgctgaaaaagccttcaataaaatttacatggccggaggtaaaggtacggtaaaaataaatgccaaagacgctttaagcgaaagcggtaatggcgaaatctattttaccagaaatggcggaacactggatctaaacggctatgaccagtcatttcagaaaatcgcagcaacagatgcgggaacaaccgtaacgaactcaaacgtgaagcaatcaacattatcacttactaatactgatgcatatatgtaccatgggaatgtatcaggtaatataagcataaatcatattatcaatactacccagcaacataacaataatgccaatctgatctttgatggctcagtcgatatcaaaaacgatatctctgtccggaatgcacagttaacattacaaggacatgcgacagaacatgccatatttaaagaaggcaataacaactgtccaattccttttttatgtcaaaaagactattctgctgccataaaggaccaggaaagcactgtaaataaacgttacaatacggaatataagtccaacaatcagatagcctctttttcccagcccgactgggaaagtcgtaaatttaatttccggaaattaaatttagaaaacgcaaccctgagtataggccgggatgctaatgtaaaaggacacatagaggctaaaaactctcaaattgttctgggaaataaaactgcatacattgacatgttctcaggaagaaacattactggcgaaggttttggattcagacaacagcttcgctccggggattcagcaggcgaaagtagtttcaacggcagtctgagtgctcaaaacagcaaaataactgttggtgataaatcaactgttactatgactggtgcattatccttaattaatacagacctgattatcaacaaaggagctactgttaccgcccagggaaaaatgtatgtagataaagctattgaactggccggaaccctgacattaacaggcacccctacagaaaataataaatacagcccggcaatctatatgtcagatggatataatatgacagaagatggtgccacgttaaaggctcaaaattatgcctgggtcaatggtaatataaaatcagacaaaaaagcatctattctgtttggtgttgaccagtataaagaagataacctggacaaaaccacacacacaccgctggctacaggtttgctgggtggctttgatacttcttataccggaggtattgatgctcctgcagcctcagccagcatgtataacaccttatggagagtaaacggacagtcagccctgcaatcattaaaaacccgcgacagtcttttgttgtttagtaacatagagaattcgggtttccatactgtgacagtaaacacactggatgccactaatactgctgtgattatgcgggctgatctgagccagtctgtaaatcaatcggataaactcattgttaaaaatcagttaaccggaagcaataacagtctgtcggtcgatatacagaaagtgggaaataataactcaggattaaacgttgacctgataacagccccaaaaggaagcaataaagagatatttaaagccagtactcaggccataggtttcagcaacatatctcctgtgatcagcacgaaagaggatcaggaacataccacgtggaccctgaccggatataaggtggctgaaaatacagcatcttccggtgcagcaaaatcgtatatgtccggtaattacaaagccttcctgacagaagtcaacaacctgaataaacgaatgggggatctgcgtgacaccaatggcgaggccggtgcatgggcccgcatcatgagcggagcaggttcagcttctggtggatacagtgacaactacacccatgtgcagattggtgtggataaaaaacatgagctggatggacttgaccttttcactggtctgactatgacgtataccgacagtcatgccagcagtaatgcattcagtggcaagacgaagtccgtcggggcaggtctgtatgcttccgctatatttgactctggtgcctatatcgacctgattagtaagtatgttcaccatgataatgagtactcggcgacctttgctggactcggaacaaaagactacagttctcattccttgtatgtgggtgctgaagcaggctaccgctatcatgtaacagaagactcctggattgagccgcaggcagaactggtttatggggccgtatcaggtaaacggttcgactggcaggatcgcggaatgagcgtgaccatgaaggataaggactttaatccgctgattgggcgtaccggtgttgatgtgggtaaatccttctccggtaaggactggaaagtcacagcccgcgccggccttggctaccagtttgacctgtttgccaacggtgaaaccgtactgcgtgatgcgtccggtgagaaacgtatcaaaggtgaaaaagacggtcgtattctcatgaatgttggtctcaacgccgaaattcgcgataatcttcgcttcggtcttgagtttgagaaatcggcatttggtaaatacaacgtggataacgcgatcaacgccaacttccgttactctttctga

SEQ ID NO: 960 - DNA, 915 bp, Shigella flexneri
gtggagctgagccgtgccacactgggtcgctggaccggtgccgttgctgaactgctggagccgctgtatgacgtcctgcgccagtatgtactgatgcccggtaaagttcatgcggatgatatccccgttccggtccaggagccgggcagtggtaaaacaagaactgcccggctgtgggtctatgtccgtgatgaccgtaacgccggttcacagatgcccccggcggtctggttcgcgtacagcccggaccggaaaggtatccatccacagaatcacctagccggttacagcggtgtgcttcaggcagatgcttacggtggttaccgggcgttatacgaatccggcagaataacggaagctgcgtgtatggcccatgcccggagaaaaatccacgatgtgcatgcaagagtgccaaccgacatcaccacggaagccctgcagcgtatcggtgaactgtataccatcgaggcagaagtccggggatgttcagcagaacagcgtctggcggcaagaaaagcaagagccgcgccactgatgcagtcactgtatgaccggatacagcaacagatgaaaacactgtcgcgtcactcggatacggcaaaagcgttcgcatacctactgaaacagtggaaggccctgaacgtgtactgcagtaatggctgggtggaaatcgacaacaacatcgctgaaaatgccctgcgggcggtcagtctgggtcgtaaaaacttcctgttcttcggctctgaccatggtggtgagcggggcgcgctactgtacagcctgatcgggacgtgcaaactgaatgacgtggatccagaaagctaccttcgccatgtgcttggcgtcatagcagactggccggtcaaccgggtcagcgaactgcttccgtggcgcatagcactgccagctgaataa

SEQ ID NO: 961 - DNA, 1413 bp, Shigella flexneri
atgtcactcagtcggcgtcagttcattcaggcatcggggattgcactttgtgcaggcgctgttcccctgaaggccagcgcagccgggcaacagcaaccgctacccgttccgccgctacttgaatctcgccgtgggcaaccgctgtttatgactgtacaacgtgcgcactggtcatttacgccagggacacgcgcgtcggtctggggaatcaatggtcgttacctggggccgactatccgcgtctggaagggcgacgatgttaagcttatttacagcaaccgcctgacagaaaatgtctcaatgacggtggccgggctacaggtaccaggcccgctgatgggcggtccggcacggatgatgtcgccaaacgctgactgggcacccgtactgcctattcgccagaacgcagctactctgtggtatcacgccaatactcccaaccgcacggctcagcaggtctataacggccttgccggaatgtggctggtggaagatgaagtcagcaagtcgctgcctatccccaaccattatggtgtggatgattttccggtcattatccaggataaacggctggataactttggtacgccagaatacaacgaaccgggaagcggcggctttgttggtgatacgctgctggttaacggtgtacaaagcccgtacgttgaagtctcgcgtggctgggtgcgcttgcgactgctgaacgcgtcgaactctcgtcgctatcaactacagatgagcgatggtcgcccgttacatgtgatttctggcgatcagggattcctgcctgctcctgtatcggtgaagcaactttcgctggcaccgggcgagcgccgcgagattctggtggatatgagcaacggcgatgaagtgtcgatcacctgtggtgaagcggcgagcattgttgatcgtattcgcggcttctttgagccatccagtattctggtttctaccttggtgctaacgctgcgcccaaccggccttctgccgctggtcacagacagtcttccgatgcgcttgctgccaactgaaatcatggctggttcgccaattcgcagtcgcgatatcagtctgggtgatgacccgggtattaatggacagctgtgggacgtcaaccgtattgatgtcaccgcgcagcaaggaacgtgggaacgctggacggtacgcgcggacgagccgcaagcgttccatattgaaggcgtaatgttccagatccgtaacgtgaatggcgcgatgccgttcccggaagacagaggctggaaagataccgtttgggttgacggacaagtggagctgcttgtttatttcggtcagccttcctgggcgcacttcccgttctacttcaacagtcagacgctggaaatggcggaccgtggctcgattgggcaactgttggtcaatccggtaccgtaa

SEQ ID NO: 962 - DNA, 2952 bp, Shigella flexneri
ttgcgaccgggcaacgcattgaaattgaacatttccgtaatgaggcaaacaatcaggaaccgttctggttgcacagcggaaaacgttaatcaggcaaggataaaatcgcttatgaagccgctctcttcaccgttacagcagtactggcagaccgttgttgagcggctgccagagcttttagccgaggaatcacttagtgcacaggcgaagtcagtacttactttcagtgattttgtgcaggacagcgtgattgcgcatccagagtggctgacggaactggaaagccaaccgccacaggctgacgaatggcaacattacagcgtgtggttgcaggaggcgctcagtaatgtgagcgacgaagccgggttaatgcgcgagctgcggctattccggcggcgcattatggtgcgcatcgcatgggcgcaaacgctggcactggttactgaagagagcatattgcagcagctcagttatctggcggagacgctgattgttgcggcgcgtgactggctgtatgacgcctgctgccgcgagtggggaacgccgtgcaatgcgcagggcgaagcgcaaccgctgctgatcttaggcatgggtaagctgggcggcggggaactgaatttctcctctgatatcgatctgatttttgcctggccggaacatggttgtacgcagggcggacgccgggaactggataacgcgcagttttttacccgcatggggcagcggctgattaaagtgctggatcaaccaacgcaggatggcttcgtctatcgcgtggatatgcgactgcgtccgtttggcgaaagtggcccgctggtgctgagctttgccgcgttggaggattattaccaggagcagggacgcgactgggagcgttacgcgatggtcaaagcgcggattatgggcgatagcgaaggcgtctatgctaacgagttgcgtgcgatgctgcgcccgtttgttttccgtcgttacatcgatttcagcgtgattcagtcgctgcgcaacatgaaagggatgattgcccgtgaagtgcgtcgacgtggtttgaccgacaatatcaaactcggcgcaggcggcattcgcgaaattgaatttatcgttcaggtgttccagctcattcgcggtgggcgcgaaccgttgctgcagtcgcgctctttactgccaacgctcagcgccattgccgcgctgcatctgctttctgaaaacgatgctgaacaattgcgagtggcatatctgttcctgcggcgtctggaaaacctgctgcaaagcattaacgacgaacaaacccaaacgcttccttctgatgagcttaaccgtgcgcggctggcgtgggcgatggactttgctgactggccgcaactgaccggggcgctgaccgcacatatgaccaatgtgcgccgggtgtttaatgaattgattggcgacgacgaaagtgaaactcaggaagagtcgctgtcggaacagtggcgtgagctgtggcaggatgcgttgcaggaagatgacactacgccagtgctggcgcatcttagcgaggatgatcgcaaacaggtcctaacgatgattgctgatttccgcaaagagctggataagcgtactatcgggccgcgaggacgtcaggtgctcgaccatctgatgccacatctgctaagtgatgtctgtgcgcgtgaagacgctgctgtcacgctgtcgcgcattaccgccttgctggtggggattgttacccgcacaacctatttagaattgctcagtgaattccctgcggcgcttaaacatttgatttctctgtgtgccgcatcgccgatgattgccagccagctagcgcgttatccattattgctggatgaattgctcgatccaaataccctttatcagccgacggcgaccgatgcctaccgtgatgaactgcgccagtatttgctgcgcgtgccggaagatgacgaagaacaacagcttgaggcgctgcgtcagttcaaacaggcgcagctgttacgcattgcggcagcggatatcgccggtacgctaccggtaatgaaagtgagcgatcacttaacctggctggcagaagctatgatagatgccgtcgttcagcaggcgtggggtcaaatggtggcccgctacggtaagccaaatcacctcaacgaacgtgaagggcgcggttttgcggtggtcggctacggcaagctgggcggctgggagttaggctacagttccgatcttgaccttatcttcctccatgattgcccaatggatgcgatgactgacggcgagcgggaaatcgacgggcggcagttttatctgcgtctggcgcaacgcattatgcatctgttcagtacgcgtacctcttccggcattttgtatgaagtggatgctcgactgcgtccgtccggggcggcgggaatgctggtgacatccgcagaagcatttgccgattatcagaaaaacgaggcctggacgtgggaacatcaggcgctggtgcgtgcgcgtgtagtgtacggcgatccgcagctcactgcgcactttgacgcggtgcgtcgtgagattatgacactgccgcgagaaggtaaaactctgcaaacggaagtgcgggaaatgcgcgagaaaatgcgcgctcatctcggcaataaacatcgtaatcgctttgatatcaaagccgatgaaggcggaattaccgatatcgaatttattacccaatatctggtgttgcgctacgctcatgaaaaaccgaagttaacgcgctggtcagacaacgtgcgtattctggagctgctggcgcaaaacgacattatggaagagcaggaagcgatggcgctgacccgtgcttacacgacgctgcgcgatgaacttcatcatctggcattacaggaattgccgggccatgtgtcggaggattgcttcaccgcagagcgtgatctggtgcgggcaagctggcagaagtggctggtggaagaatga

SEQ ID NO: 963 - DNA, 1497 bp, Shigella flexneri
atggcgaaagaaaaaagacgtggctttttttcctggctgggctttggtcaaaaagagcagaccccggaaaaagagacagaagttcagaatgaacaaccggttgtagaagaaatcgttcaggcgcaagagcctgcgaaggcttctgaacaagccgttgaagagcagccgcaggcgcatactgaagccgaggcggaaacttttgctgccgacgttgtggaagtcactgaacaggttgttgaaagtgaaaaagcgcagcctgaagcggaagttgttgcacagccggaaccggtcgtagaagaaacgccggagccagtggctatcgaacgtgaagagctgccgttgccggaagacgtcaacgccgaagaggtttcgccagaagagtggcaggctgaagcggaaaccgtagagattgtcgaagcggcagaagaagaagcggctaaagaagaaatcaccgacgaagagctggaagcacaggcgctggctgccgaagcggcagaagaggcggtgatggtagttcctccggcagaagaagagcagccggttgcagaaattgcccaggagcaagaaaaaccgaccaaagaaggcttcttcgcgcgcctgaaacgcagcctgttaaaaaccaaagaaaatctcggttccggatttatcagcctgttccgcggtaaaaaaatcgacgatgatctgtttgaagagctggaagaacagctgttgatcgccgatgtgggcgtggaaaccacacgtaaaattatcaccaatctgacggaaggcgcatcccgcaagcagcttcgtgatgccgaggcgctctatggcctgctgaaagaagagatgggcgagattctggcgaaagtcgatgagccgctgaatgttgaagataaaacgccgttcgtgatcctgatggtgggcgtcaacggtgtgggtaaaaccacgacgattggtaagctggcgcgtcagtttgagcagcagggtaaatcggtgatgctggcggcgggcgatactttccgtgcagctgcggttgaacagcttcaggtctggggtcagcgcaacaatattccggtgattgcccagcataccggtgcggattccgcctctgttatcttcgacgccattcaggcagctaaagcgcgtaatatcgacgtcctgattgccgataccgccggacgtctgcagaacaaatcgcatctgatggaagagttgaagaaaatcgtccgcgtgatgaagaaactcgacgttgaagcgccgcatgaagttatgctgactattgatgccagcaccgggcagaacgcggtaagccaggccaaactgttccacgaagctgttggcttaaccggcatcacgctaacgaaactggacggcacggcgaaaggcggggtaattttctcggtggctgaccagtttggtatccctatccgctacattggtgtcggcgaacgtattgaggatttgcgtccgtttaaggcggacgactttatagaggcactttttgcccgagaggattaa

SEQ ID NO: 964 - DNA, 1275 bp, Shigella flexneri
atgatggcgggaaccgttttgtatcaggaccgcgccatgaaacagataacctttgctccccgtaatcacctgctcaccaataccaataccaataccaatacaaataccaatacctggacgcccgacagccagtggctggtatttgacgtgcgtccttctggggcgtcgtttaccggcgagaccattgagcgtgtgaatatccatacaggcgaggtcgaggttatctatcgcgcgtcacagggcgcacacgtcggcgtggtgaccgttcatccgaagtcagagaaatatgtctttattcacggccctgaaaatcctgatgaaacatggcattacgacttccatcatcgacgcggagtcattgctgaaggcggcaaggtgagcaatctcgatgcaatggatattaccgcgccgtatacgccaggagcgctgcgcggtggcagccatgtgcatgtctttagcccgaacggtgaaagggggagctttacctataacgaccatgtaatgcatcaactcgatccggcgctggatttgcgaaacgtcggggttgctgcaccgtttggcccggtcaacgtacaaaagcaacatccgcgtgaatacagcggtagccactggtgtgtgctggtgagtaaaaccacgcccacgccgcagcctggcagtgatgaaatcaatcgtgcttatgaagaaggatgggtaggaaatcacgcgctggcgtttattggcgacacactttcgccaaagggcgagaaagtgccggagctatttatcgttgagttaccgcaagatgaagctagctggaaatcggcaggtgatgcgccgttaagtggaacggaaacaaccctacccgcgccaccgcgtggcgtcgtgcagcgacgtttaacctttacccatcatcgggcttatccggggttagtcaacgtcccgcgccactgggtgcgctgtaatccgcagggtacgcaaatcgcgtttttaatgcgtgatgataacggcattgtgcaactgtggcttatctcgccacagggcggcgaaccgcgcaagttaacccataacaaaacggatattcagtctgcatttaactggcatccgtcaggagaatggttgggctttgtgctggataatcgaattgtttgtgcccatgcgcaaagcggcgaggttgagtatttaaccgaaaaccacgccaatccaccttctgcggacgccgtggtcttctcgccggatggtcaatggctggcgtggatggaaggtggccagctgtggatcaccgaaactgatcgctaa

SEQ ID NO: 965 - DNA, 768 bp, Shigella flexneri
ttgtatatgtccaagtctgatgtttttcatctcggcctcactaaaaacgatttacaaggggctacgcttgccatcgtccctggcgacccggatcgtgtggaaaagatcgccgcgctgatggataagccggttaagctggcatctcaccgcgaattcactacctggcgtgcagagctggatggtaaacctgttatcgtctgctctaccggtatcggcggcccgtctacctctattgctgttgaagagctggcacagctgggcattcgcaccttcctgcgtatcggtacaacgggcgctattcagccgcatattaatgtgggtgatgtcctggttaccacggcgtctgtccgtctggatggcgcgagcctgcacttcgcaccgctggaattcccggctgtcgctgatttcgaatgtacgactgcgctggttgaagctgcgaaatctattggcgcgacaactcacgttggcgtgacagtttcttctgataccttctacccaggtcaggaacgttacgatacttactctggtcgcgtagttcgtcactttaaaggttctatggaagagtggcaggcgatgggcgtaatgaactatgaaatggaatctgcaactctgctgaccatgtgtgcaagtcagggcctgcgtgccggtatggtagcgggtgttatcgttaaccgcacccagcaagagatcccgaatgctgagacgatgaaacaaaccgaaagccatgcggtgaaaatcgtggtggaagcggcgcgtcgtctgctgtaa

SEQ ID NO: 966 - DNA, 1050 bp, Shigella flexneri
atggcaacaggcacgcagcccgatgctgggcagatcctcaactcgctgattaacagtattttgttaattgatgacaatctggcgatccattacgccaaccccgccgcgcaacaactgctcgcccaaagctcccgcaaattgtttggtacgccgttaccggaactgttgagctacttctcattaaatatcgagctgatgcaagaaagtctggaggcggggcaaggctttaccgataacgaagtgacgctggtcatcgatggtcgctcgcatatcctttctgtgacggcccagcgtatgccggacggcatgatcctgctggagatggcaccgatggataaccagcgccgcttaagccaggaacaactacaacatgctcaacaagtagctgcccgtgatttagtgcgcggcctggcacatgagattaaaaatccgcttggcggtttacgtggcgcggcgcagttactcagcaaagcgttacctgacccatcactactcgaatataccaaagtgattatcgaacaggcggaccggctgcgaaatttggtcgaccgtctgttggggccgcagctgcccggtacgcgcgttaccgaaagtattcacaaagtggctgaacgcgtggtaacgctggtgtcgatggaactgccggacaacgtgcggttgattcgtgattacgatcccagcctgccggaactggcgcacgacccggatcaaattgaacaggtcttgctgaatattgtgcgcaatgcgctacaggcgctggggccggaaggcggtgaaatcattctgcgtacccgcaccgcgtttcaactgaccttacacggcgagcgctaccggctggcggcgcggattgatgtggaagataacgggccgggcattccgcctcatttgcaggatacgctgttttacccgatggtcagcggccgcgaaggtggcaccgggcttggcttatccatcgcccgtaatttgattgatcagcattcaggcaaaattgaatttaccagttggccaggtcataccgagttctcggtttacctgcctatcaggaaataa

SEQ ID NO: 967 - DNA, 903 bp, Shigella flexneri
atggcttatcaatctcaagatatcattcgtcgttccgcgactaacggtctgacccccgcgcctcaggcgcgggacttccaggaagaagtggcgaaactcatcgacgttaccacctgtatcggctgtaaagcctgtcaggtggcgtgttcagagtggaacgacattcgcgataccgtcggcaataacattggggtgtacgacaaccccaatgatttaagcgccaaatcgtggacggtaatgcgcttctcggaagtggagcagaacgacaaactggaatggctgatccgcaaagacggctgtatgcactgttccgatccaggctgcctgaaagcgtgcccggcggaaggtgcaattattcagtatgccaacggtatcgtcgacttccagtccgagcagtgcattggctgcggttattgcattgcgggctgtccgttcgacattccgcgcctcaacccggaagacaaccgcgtctacaaatgtacgctgtgcgttgaccgcgtggtggttgggcaagaaccagcctgcgtgaagacctgcccaacgggcgcgattcacttcggcacgaaagagtcgatgaaaacgctggcgagcgagcgcgttgctgagctgaaaacccgcggttacgacaatgcgggtctgtacgatccggcaggcgtcggtggtacacacgtcatgtacgtgctgcaccatgctgacaagccaaatctgtatcatggcttgccggagaacccggaaatcagcgaaaccgtgaaattctggaaaggcatctggaaaccgctcgcggctgttggctttgcggctacctttgcggccagtatcttccactacgtgggtgtcggtccgaaccgtgcggatgaggaagagaataatctgcacgaagagaaagacgaggagcgcaaatga

SEQ ID NO: 968 - DNA, 4062 bp, Shigella flexneri
atgggtcgacttgtcagcgagctgaggaaccctatggtttactcctataccgagaaaaaacgtattcgtaaggattttggtaaacgtccacaagttctggatgtaccttatctcctttctatccagcttgactcgtttcagaaatttatcgagcaagatcctgaagggcagtatggtctggaagctgctttccgttccgtattcccgattcagagctacagcggtaattccgagctgcaatacgtcagctaccgccttggcgaaccggtgtttgacgtccaggaatgtcaaatccgtggcgtgacctattccgcaccgctgcgcgttaaactgcgtctggtgatctatgagcgcgaagcgccggaaggcaccgtaaaagacattaaagaacaagaagtctacatgggcgaaattccgctcatgacagacaacggtacctttgttatcaacggtactgagcgtgttatcgtttcccagctgcaccgtagtccgggcgtcttctttgactccgacaaaggtaaaacccactcttcgggtaaagtgctgtataacgcgcgcatcatcccttaccgtggttcctggctggacttcgaattcgatccgaaggacaacctgttcgtacgtatcgaccgtcgccgtaaactgcctgcgaccatcattctgcgcgccctgaactacaccacagagcagatcctcgacctgttctttgaaaaagttatctttgaaatccgtgataacaagctgcagatggaactggtgccggaacgcctgcgtggtgaaaccgcatcttttgacatcgaagctaacggtaaagtgtacgtagaaaaaggccgccgtatcactgcgcgccacattcgccagctggaaaaagacgacgtcaaactgatcgaagtcccggttgagtacatcgcaggtaaagtggttgctaaagactatattgatgagtctaccggcgagctgatctgcgcagcgaacatggagctgagcctggatctgctggctaagctgagccagtctggtcacaagcgtatcgaaacgctgttcaccaacgatctggatcacggcccatatatctctgaaaccttacgtgtcgacccaactaacgaccgtctgagcgcactggtagaaatctaccgcatgatgcgccctggcgagccgccgactcgtgaagcagctgaaagcctgttcgagaacctgttcttctccgaagaccgttatgacttgtctgcggttggtcgtatgaagttcaaccgttctctgctgcgcgaagaaatcgaaggttccggtattctgagcaaagacgacatcattgatgttatgaaaaagctcatcgatatccgtaacggtaaaggcgaagtcgatgatatcgaccacctcggcaaccgtcgtatccgttccgttggcgaaatggcggaaaaccagttccgcgttggcctggtacgtgtagagcgtgcggtgaaagagcgtctgtctctgggcgatctggataccctgatgcctcaggatatgatcaacgccaagccgatttccgcagcagtgaaagagttcttcggttccagccagctgtctcagtttatggaccagaacaacccgctgtctgagattacgcacaaacgtcgtatctccgcactcggcccaggcggtctgacccgtgaacgtgcaggcttcgaagttcgagacgtacacccgactcactacggtcgcgtatgtccaatcgaaacccctgaaggtccgaacatcggtctgatcaactctctgtccgtgtacgcacagactaacgaatacggcttccttgagactccgtatcgtaaagtgaccgacggtgttgtaactgacgaaattcactacctgtctgctatcgaagaaggcaactacgttatcgcccaggcgaactccaacctggatgaagaaggccacttcgtagaagacctggtaacttgccgtagcaaaggcgaatccagcttgttcagccgcgaccaggttgactacatggacgtatccacccagcaggtggtatccgtcggtgcgtccctgatcccgttcctggaacacgatgacgccaaccgtgcattgatgggtgcgaatatgcaacgtcaggccgttccgactctgcgcgctgataagccgctggttggtactggtatggaacgtgctgttgccgttgactccggtgtaactgcggtagctaaacgtggtggtgtcgttcagtacgtggatgcttcccgtatcgttatcaaagttaacgaagacgagatgtatccgggtgaagcaggtatcgacatctacaacctgaccaaatacacccgttctaaccagaacacctgtatcaaccagatgccgtgtgtgtctctgggtgaaccggttgaacgtggcgacgtgctggcagacggtccgtccaccgacctcggtgaactggcgcttggtcagaacatgcgcgtagcgttcatgccgtggaatggttacaacttcgaagactccatcctcgtatccgagcgtgttgttcaggaagaccgtttcaccaccatccacattcaggaactggcgtgtgtgtcccgtgacaccaagctgggtccggaagagatcaccgctgacatcccgaacgtgggtgaagctgcgctctccaaactggatgaatccggtatcgtttacattggtgcggaagtgaccggtggcgacattctggttggtaaggtaacgccgaaaggtgaaactcagctgaccccagaagaaaaactgctgcgtgcgatcttcggtgagaaagcctctgacgttaaagactcttctctgcgcgtaccaaacggtgtatccggtacggttatcgacgttcaggtctttactcgcgatggcgtagaaaaagacaaacgtgcgctggaaatcgaagaaatgcagctcaaacaggcgaagaaagacctgtctgaagaactgcagatcctcgaagcgggtctgttcagccgtatccgtgctgtgctggtagccggtggcgttgaagctgagaagctcgacaaactgccgcgcgatcgctggctggagctgggcctgacagacgaagagaaacaaaatcagctggaacagctggctgagcagtatgacgaactgaaacacgagttcgagaagaaactcgaagcgaaacgccgcaaaatcacccagggcgacgatctggcaccgggcgtgctgaagattgttaaggtatatctggcggttaaacgccgtattcagcctggtgacaagatggcaggtcgtcacggtaacaagggtgtaatttctaagatcaacccgatcgaagatatgccttacgatgaaaacggtacgccggtagacatcgtactgaacccgctgggcgtaccgtctcgtatgaacatcggtcagatcctcgaaacccacctgggtatggctgcgaaaggtatcggcgacaagatcaacgccatgctgaaacagcagcaagaagtcgcgaaactgcgcgaattcatccagcgtgcgtacgatctgggcgctgacgttcgtcagaaagttgacctgagtaccttcagcgatgaagaagttatgcgtctggctgaaaacctgcgcaaaggtatgccaatcgcaacgccggtgttcgacggtgcgaaagaagcagaaattaaagagctgctgaaacttggcgacctgccgacttccggtcagatccgcctgtacgatggtcgcactggtgaacagttcgagcgtccggtaaccgttggttacatgtacatgctgaaactgaaccacctggtcgacgacaagatgcacgcgcgttccaccggttcttacagcctggttactcagcagccgctgggtggtaaggcacagttcggtggtcagcgtttcggggagatggaagtgtgggcgctggaagcatacggcgcagcatacaccctgcaggaaatgctcactgttaagtctgatgacgtgaacggtcgtaccaagatgtataaaaacattgtggacggcaaccatcagatggagccgggcatgccagaatccttcaacgtattgttgaaagagattcgttcgctgggtatcaacatcgaactggaagacgagtaa

SEQ ID NO: 969 - DNA, 1512 bp, Shigella flexneri
atggagtttagtgtaaaaagcggtagcccggagaaacagcggagtgcctgcatcgtcgtgggcgtcttcgaaccacgtcgcctttctccgattgcagaacagctcgataaaatcagcgatgggtacatcagcgccctgctacgccggggcgaactggaaggaaaaccggggcagacattgttgctgcaccatgttccgaatgtactttccgagcgaattctccttattggttgcggcaaagaacgtgagctggatgagcgtcagtacaagcaggttattcagaaaaccattaatacgctgaatgatactggctcgatggaagcggtctgctttctgactgaactgcacgttaaaggccgtaacaactactggaaagtgcgtcaggctgtcgagacagcaaaagagacgctctacagtttcgatcagttgaaaacgaataagagcgaaccgcgtcgtccgctgcgtaaaatggtgttcaacgtgccgacccgccgtgaactgaccagcggtgagcgcgcgatccagcacggtcaggcgattgccgccgggataaaagcagcgaaagatctcggtaatatgccgccgaatatctgtaacgccgcttatctcgcctctcaggcgcgccagctggctgacagctacagcaagaatgtcatcacccgcgttatcggcgaacagcagatgaaagagctgggaatgcactcttatctggcggtcggtcagggttcacaaaacgaatcgctgatgtcggtgattgagtacaaaggcaacgcgtcggaagatgcacgcccaatcgtgctggtgggtaaaggtttaaccttcgactccggcggtatctccatcaagccttcagaaggcatggatgagatgaagtacgatatgtgcggcgcggcggcagtttacggcgtgatgcgtatggtcgcggagctgcaactgccgattaacgttattggcgtgctggcaggctgtgaaaacatgcctggcgggcgtgcctatcgtccgggcgatgtgttaaccaccatgtccggtcaaaccgttgaagtgctgaacaccgatgccgaaggccgcctggtactgtgcgacgtgttaacttacgttgaacgttttgagccggaagcagtgattgacgtggcgacgctgaccggtgcctgcgtgatcgcgctgggtcatcatattactggtctgatgacgaaccataatccgctggcccatgaactgattgccgcgtctgaacaatccggtgaccgcgcatggcgcttaccgctgggtgacgagtatcaggaacagctggagtccaattttgccgatatggcgaacattggcggtcgtcctggtggggcgattaccgcaggttgcttcctgtcacgctttacccgtaagtataactgggcgcacctggatattgcaggaaccgcctggcgttctggtaaagcaaaaggcgcaaccggtcgtccggtagcgttgctggcacagttcctgttaaaccgcgctgggtttaacggcgaagagtaa

SEQ ID NO: 970 - DNA, 564 bp, Shigella flexneri
atgccactgctggataagctgcgtgagcagtacggggtcggaccggtatgcagtgaactgcatattgccccatcaacgtattaccactgtcagcaacagcgacatcatcatgataaacgcagtgcccgtgcgcagcgcgatgactggctgaagaaagagatactgcgcgtatacgatgagaatcatcaggtatacgctgtgcgtaaagtctggcatcagttgttacgggaaggtatcagagtggccagatgcactgtggcacgtctcatggcggttatggggcttgccggtgttctccggggtaaaaaggtccacactaccgtcagccggaaagccgttgccgcaggcgaccgcgtaaaccgtcatcaaggcaatgtgccgcgtactccgggtggcccgcagcggctggtatacgtggtgtcagcggcggacaaggataaacacacgtccgcagttccgtcagcactgcgacagcgttgtccgcaaggcttttacccagtccagcgttacggtgccccacgcctgacggatgaactgtgtgctctggttaccactttaacgtaa

SEQ ID NO: 971 - DNA, 819 bp, Shigella flexneri
atgtgtcaggtatttggtgtatccaggagcggttattacaactgggtacagcatgaaccctcagacagaaaacaaagtgatgagcggctaaaactggagattaaggtggcacatatccgcactcgcgaaacatatggaacccggcggctccagacggagctggcagagaatggcatcatcgttggtcgtgaccgactggcatgtcttcgtaaggagctgaggctacgctgtaagcagaaacgcaagttcagagcgactacgaacccgaaccacaatctgccagttgcgccaaatctgctgaaccagacgttcgctcctacagcaccaaatcaggtctgggtggcggacctgacgtatgttgccacacaggagggatggttgtacctcgctggcatcaaagatgtttatacgtgcgaaattgtcggctacgccatgggagagcgcatgacaaaagagctgacaggtaaagccctgtttatggcgctcaggagccagcgcccacctgccgggctaatccaccactctgatcgaggttcacagtactgcgcatacgattaccgggtcatacaggagcagtctggtctgaaaacatcaatgtcgcgtaaaggtaactgttacgacaacgctccgatggaaagcttctggggaacgctgaaaaatgagagcctgagccactatcgttttaataaccgggatgaagccatctcagtaatacgggaatacattgagattttctacaatcgtcagcgtcgtcactctcgtctggggaatatctccccggcagccttcagggaaaaatatcatcagatggctgcttaa

SEQ ID NO: 972 - DNA, 279 bp, Shigella flexneri
aaaacttctccgggatgtgctgtttcagcctcgcgaccagctcacgctgtgtcagcgtttccgtcgccgtttctcccgttttgtggtccaggtaacggaagctcaggctcgcccctccgttgtaatgtgccagccgggaggccgctatcggcggcttcttcagataacgacccaggtagcgcgccgtattcctcccgccggccgtttttttcgacatgtacacatgccagtattttcctccggctttcagcaccaggcttctcctctgtgattccgtcg

SEQ ID NO: 973 - DNA, 3309 bp, Shigella flexneri
atgaatcaaattcacaaatttttttgtaatatgacccaatgttcacaggggggggccggagaattacctacggtaaaggaaaaaacatgcaaattgtctttttctccttttgttgttggtgcatccctgttgctcggggggccaatagcttttgctactcctctttcgggtactcaagaacttcatttttcagaggacaattatgaaaaattattaacacctgttgatggactttctcccttgggagctggtgaagatggaatggatgcgtggtatataacttcttccaacccctctcatgcatctagaactaagctacggattaactctgatattatgattagcgcaggtcatggtggtgctggtgataataatgatggtaatagttgtggcggtaatggtggtgactctattaccggatctgacttgtctataatcaatcaaggcatgattcttggtggtagcggcggtagcggtgctgaccataacggtgatggtggtgaggctgttacaggagacaatctgtttataataaatggagaaattatttcaggtggacatggtggcgatagttatagtgatagtgatggggggaatggaggtgatgccgtcacaggagtcaatttacccataatcaacaaagggactatttccggtggtaatggaggtaacaattatggtgagggtgatggcggtaatggaggtgatgccatcacaggaagcagcctctctgtaatcaataagggcacgttcgctggaggcaacggaggtgctgcttacggttatggttatgatggctacggtggtaatgctatcacaggagataacctgtctgtaatcaacaatggagctattttaggcggtaatggtggacattggggggatgctataaatggtagcaatatgaccattgctaatagcggatatataatttcaggtaaagaagatgatggaacacaaaatgtagcaggtaatgctatccacatcactggtggaaacaattcattaatactccatgaaggttctgtcattactggtgatgtacaggttaacaattcatccattctgaaaattatcaacaatgattacactgggaccacaccaactattgaaggtgatttatgtgctggtgattgtacaactgtttcactatcaggtaacaaattcactgtttcaggtgacgtttcttttggtgagaacagttctttaaatttagctggaatcagtagtctggaagcttctggaaatatgtcatttggcaacaatgtaaaagtggaggctattataaataactgggcgcagaaggactataaactgctaagtgcagataaagggataacaggtttcagtgtttctaatatatctatcatcaatccgttactcactactggtgctattgactatacaaaaagctatatcagtgaccagaataaattgatctacggtttgagctggaatgatacagatggcgacagtcatggagagttcaatctgaaagaaaacgctgaacttactgttagtactattctggcagataatctcagccatcataatataaatagctgggacggaaaatccctaacaaaatcaggggagggaactctcattttggcggaaaaaaatacctactctggtttcaccaacatcaatgcaggcattctaaaaatggggacagttgaagctatgacacgtaccgctggtgttattgttaataaaggtgctaccttgaatttttcaggcatgaaccaaactgttaacactttattaaatagtgggactgtgctaatcaataatattaatgccccttttttgcctgaccccgtcattgtcacaggtaacatgactctggagaaaaacggtcatgttattctcaataatagttcgtcaaatgtcggtcagacctatgttcagaaaggtaattggcatggaaagggcggaatattatctttgggcgcggttctcggcaatgacaacagtaaaactgaccggctggaaattgcaggccatgcgtctggtattacctatgttgcagtgacaaatgagggaggctctggagataaaactcttgaaggtgttcaaattatttcgacagattcttctgataagaatgcttttattcagaaaggccgtattgttgctggtagttatgactatcgcctgaaacagggcactgtatctggactgaataccaataagtggtatctaactagtcagatggataatcaagaatcaaaacagatgagcaatcaagagtctactcaaatgagtagtcgccgagctagttcacagcttgtatcttcacttaatttgggtgaaggtagtattcacacatggcgccctgaagctggcagttatattgctaacctgatagcaatgaacacgatgtttagtccttctctctatgaccgacacggtagcactattgttgatcctactacaggtcagctcagcgaaaccaccatgtggattcgtactgttggtggacataatgagcataatttagctgatagacaattaaaaaccacagctaacaggatggtttatcagattggtggagatattttgaagacaaacttcactgatcatgatggcttgcatgtgggtattatgggagcttatggatatcaggatagcaaaactcataataagtatactagttatagttcacgaggaactgtgagcggttatactgccggtttgtacagttcttggtttcaggatgaaaaagaacgaacaggtctatatatggatgcttggttgcagtacagttggtttaataatacagtcaaaggagatgggttaactggtgagaaatattccagcaaaggaataacaggagctttggaagctggctatatctacccaaccatacgctggactgctcataataatattgacaacgcattgtatctcaatccacaagtccagataactaggcatggggtaaaagcaaacgactatattgaacacaatggcactatggtcacatcctctgggggcaataatattcaagcaaaattgggattgcgtacatccttaattagtcagagttgtatcgataaggagactcttcgtaagttcgaaccatttttggaagtgaattggaaatggagctcaaagcaatatggtgtaattatgaatggcatgtcaaatcaccagataggcaaccgtaatgtgattgaactcaaaactggtgtgggggggcgtcttgcagataacctaagcatctggggaaacgtatctcagcaattgggtaataacagttacagagacacccaaggtattttgggtgtgaaatataccttctga

SEQ ID NO: 974 - DNA, 537 bp, Shigella flexneri
tttcattatcatggaagttcgtatatctggttctgttgccgtgacacgcgccattgccgtgcccggattgctgttattactgattatcgcgacggcattaagcctgctcattggggcaaaatcactccccgcttccgtagtgctggaggccttctccggcacctgccagagcgccgactgcaccatcgtgctcgacgcgcggctgccgcgtacccttgccggtttactggcaggcggcgcgcttggccttgccggggcgttaatgcaaaccctcacccgaaacccacttgccgaccccggcttgcttggcgtgaacgccggagccagctttgccattgtgctgggtgcggcgctgtttggttactcatccgcacaggaacaactggcgatggccttcgccggggcgctggtggcctcattgattgttgcctttaccggcagtcagggtggagggcagttaagtccggtgcgtttaaccctggcgggcgtggcgctggcggcggtgctggaaggactgaccagcggcatcgccctgct

SEQ ID NO: 975 - DNA, 234 bp, Shigella flexneri
ttcatcgtgccggatgtgcggaaaccatattattgtttgccaaccaccgccattttcttcatgacaatcagggctggtcaggcgcaatcgctcagttacgtcgccacgcacccgagaagaaaattgttgttgaagccgacacgccgaaagaggctatcgccgcgttacgcgcacaaccagacgtacttcagctcgacaaatttagtccgcaacaggcaactgaaattgcgcaaa

SEQ ID NO: 976 - DNA, 348 bp, Shigella flexneri
aacaagtctccacagaaatgttccgcaaagagtacgcagaagtttttgaaggcacagcagagtggaaggaaattaacgtcacacgatccgatacctacggttggcaggaggactcaacctatattcgcttatcgcctttctttgatgaaatgcaggcaacaccagcaccagtggaagatattcacggtgcgcggatcctcgcaatgctgggggattcagtcaccactgaccatatctctccggcgggcagtattaagcccgacagcccagcgggtcgatatctacaaggtcggggtgttgagcgaaaagactttaactcctacggttcgcggcgtggtaaccatgaag

SEQ ID NO: 977 - DNA, 69 bp, Shigella flexneri
ctatcggctggtgatgcgtccttacggcgcgacgtttctcgccagtctgccgcccgcgccacgcacccg

SEQ ID NO: 978 - DNA, 288 bp, Shigella flexneri
acggctggctgcgttttatgccgaacgcgcccgtcacggcgtggcgctgattgtcagcggcggcattgcaccagatttaacaggcgttggcatggaaggtggcgcaatgctcaacgacgccagccagatcccacaccatcgcaccattaccgaagccgtacatcaggaaggcggcaaaatcgccctgcaaattttgcataccgggcgctacagctaccaaccgcatctggtcgcaccgtccgcattgcaggcccccatcaaccgtttcgttcctcacgaactcaccca

SEQ ID NO: 979 - DNA, 171 bp, Shigella flexneri; identical to SEQ ID NO: 218

SEQ ID NO: 980 - DNA, 141 bp, Shigella flexneri
atggttaagcgcgatcctccccgtggtcattgttgggctggtagggttgtttgcggtgacggtgattcgcgattatgggcgcgagactgccgccgccagacaaacgctgctggaaaaaggcagtgtacttattcgcgctct

SEQ ID NO: 981 - DNA, 297 bp, Shigella flexneri
tcaaaggcaaaccgcaaaccctgcgatcgccacatcaggcttcagtactgggcatcggattctgcccggaagacaggaaaaccgatggcatcatcgccgccgcctcggtgcgggaaaatatcatcctcgctctccaggcccagcgcggctggctacgacccatttcccgcaaagagcagcaagagattgccgaacgctttatccgccagcttggcattcgcacaccttcaactgaacaaccgattgaatttctctccggtggcaatcagcaaaaagtgctgctttcacgttggctac

SEQ ID NO: 982 - DNA, 120 bp, Shigella flexneri
tgtggtgagggaacgcggcgcgcgccaaccagccacccctgttctaacaacatgcaggatctccttatatgtggtgctaatacccggttcagagtagcatgtttctaccttatgattcgt

SEQ ID NO: 983 - DNA, 207 bp, Shigella flexneri
aacgtacagtacccagtagttccagccagaggcgaaaccggcaaaactgccccagtatttataagcaaagtggctaaaggagcctgcgacaggttcttcgaccaccatttcacccagctgacgcatgatcagaaaggcgataaaaccagcaatggcgtaacccaggataatccctggccctgcggactgtattacggaggcgctacc

SEQ ID NO: 984 - DNA, 144 bp, Shigella flexneri
cattccggactggcacagccgagcagcgcctcgcggacgctgccatcggaaagcggaatacgggcggaaagtaaagtcgcaccccagtccatcagcgtgactaccatccctgcgttgttacgcaaagttaacagtcggtacggc

SEQ ID NO: 985 - DNA, 591 bp, Shigella flexneri
gtgttggttcgaatagcgccagttgtttacgactcatattcagtgctcactcaatatcatcaggagagatattccgccaccggaccaagcgccagggcagggataaaggtcagtgcgccaaccagcaacacggtgccgattaacaggccaacaaacagcgggccgtgcgttggcagcgtgccggagctggcgggttggctctttttactcaccagcgaaccggcaattgccatcaccgggataatcaccccgaagcgaccgacaaacatgcagaacgccagtaaacagttccagaacggagagttggcgcttaatccggcaaaggcgctgccgttgttgttagcggcggacgacacggcgtacagcacttcgctaaaaccatgcgggctagggttaagcatggcgctacgtccggcgtcggtcatcatcgccaacgccgcgcccatcagtaccagtgttggagtaaccagaatcgccagtgcagtcagtttcatctcgcgtacgtctatttttttacccagatattccggtgtacgaccaatcatcagcccggcaataaacaccgccagcaggacaaacagcatcatgccg

SEQ ID NO: 986 - DNA, 90 bp, Shigella flexneri
ccagttccgccagttcagcggaaaactgttcatcaagacgctgtaattcatcattggtatgcgccgcagtcatcgcaaaaaagacgctgg

SEQ ID NO: 987 - DNA, 108 bp, Shigella flexneri
cccaccgccaccggcaatcgagtcgataaatcccgccagcatggcgacaaaaaagagaactcccagcaacagcggagaaaccataaacaggctattaaacgtttccat

SEQ ID NO: 988 - DNA, 132 bp, Shigella flexneri
aggctttcgccagcagcggaatatcttccggacgctcgcgtagtggcggcaggtgaatcgggaatacgttcaggcggtaatagagatcgctacggaactctcggtcggcgaccatttttttcagatcgcggt

SEQ ID NO: 989 - DNA, 417 bp, Shigella flexneri; identical to SEQ ID NO: 176

SEQ ID NO: 990 - DNA, 114 bp, Shigella flexneri
ccgaactcagcgagaaaatgggtgatcagcccgcgaccggggttaaacaggaagatccacaatacggcggcaacggcgggagccacggcatacggcagcaacattaaggtttgg

SEQ ID NO: 991 - DNA, 225 bp, Shigella flexneri
tcacaaccgcgtttggcgtggcgacattcgccagcggtggcgcgtagtccgggcgctttaccaccacgcgtttggtcgccagcaagcgtgcaggctccagtaatccatcggcatcaagatccggccccaccagcgactgaaagacacgcatctcttttttcaccagcgcgcttttctgcttatgcgggaacatcggatcgagatagaccacctgcgggcgtgggg

SEQ ID NO: 992 - DNA, 135 bp, Shigella flexneri
gcaacacctgcgcggcgttttgcaggtgcgactcatccgggcgatgcaaataacgtaaaaattcgtcaccggctgactttcccatttgatcgaccatcgactccacgggtacgacatcgatattcagccgatcgc

SEQ ID NO: 993 - DNA, 180 bp, Shigella flexneri
cgcagcttgttcatttctgccgggtcgatatccatatggataacactggcgtgtggtgcgaaggtgttcagtttgccggtcacccggtcatcaaaacgtgcacccacggcgatcagcaggtcacactcctgcaccgcgaagtttgccgctttggttccgtgcatccccagcatgcccaga

SEQ ID NO: 994 - DNA, 120 bp, Shigella flexneri
cgtttccggattgcaggagatatacagaatacgtggatacgcctgcaccattttctcggtttcactgtccagaccgctgcgcggtgggtcgacaaaaatggtttcgaactgatagctctt

SEQ ID NO: 995 - DNA, 336 bp, Shigella flexneri
tttttgcagcgtttcgttgctgatctcccgcgtggcgcgcaggtggtacagttcagcacgttcagaacgcaatgccgccagacggaagcgacgctcaaggttctcttcctgcacggaactttcaacgtcgttacgtccatcggcgcgacgacgcaggttaccaatgacgcgagaactgacctccgtaagcaactggttatcgatattctcttcggtatccgccgccagacgctcctccattttctggatcgccacaatcgccacttctgccgttgccgctcgcgcaatacgttcttctttcaattgttgcgaatggtccgcgacttcaatgtgttg

SEQ ID NO: 996 - DNA, 87 bp, Shigella flexneri
caggcggcgttaagcaccgctgcgtcgtccagcgcccggcggttatcatcaatcgccagtttgcgttccgccagtgtcggcgcggtg

SEQ ID NO: 997 - protein, 494 aa, Shigella flexneri
MILKISNFIDASNTKGPIRVEDTEHGPILIAQKFNLKDLFFRTLSTINAKINSQILNEQLKNYRLENQKSLLLFLNTLASEKSAESAFAAYEAAKNSIQHSFTGRDIKLMLNTAERFHGIGTAKNLERHLVFRCWGNRGITHLGHTSISIKNNLLQEPTHTYLSWYPGGNVTKDTEINYLFEKRSGYSVDTYKQDKLNMISDQTAERLDAGQEVRNLLNSKQDQNNNKKIFFPRANQKKDPYGYWGVSADKVYIPLSGDNKTKDGKISHNLFGLDETNMSKFICKKKADAFRQLANYKLISKSENCAGMALNVLKAGNSEIYFPLPDVKLVATPNDVYAYANKVRQRIESLNQSYNEIMKYIESDFDLSRLTQLRRSYLKSFNKINLIHTPKTFKPLSISLYKHPTENVSSEDFDAVINACHSYLVKSAPSNMTRVLNELKTEATDKKEEIIEKSIKIIDYYNSLKSPDLGTKLYIHDLLQINKLLLNNSHSNI

SEQ ID NO: 998 - protein, 633 aa, Shigella flexneri
MHNVNNTQAPTFLYKATSPSSTEYSELKSKISDIHSSQTSLKTPASVSEKENFATSFNQKCLDFLFSSSGKEDVLRSIYSNSMNAYAKSEILEFSNVLYSLVHQNGLNFENEKGLQKIVAQYSELIIKDKLSQDSAFGPWSAKNKKLHQLRQNIEHRLALLAQQHTSGEALSLGQKLLNTEVSSFIKNNILAELKLSNETVSSLKLDDLVDAQAKLAFDSLRNQRKNTIDSKGFGIGKLSRDLNTVAVFPELLRKVLNDILEDIKDSHPIQDGLPTPPEDMPDGGPTPGANEKTSQPVIHYHINNDNRTYDNRVFDNRVYDNSYHENPENDAQSPTSQTNDLLSRNGNSLLNPQRALVQKVTSVLPHSISDTVQTFANNSALEKAFNHTPDNSDGIGSDLLTTSSQERSANNSLSRGHRPLNIQNSSTTPPLHPEGVTSSNDNSSDTTKSSASLSHRVASQINKFNSNTDSKVLQTDFLSRNGDTYLTRETIFEASKKVTNSLSNLISLIGTKSGTQERELQEKSKDITKSTTEHRINNKLKVTDANIRNYVTETNADTIDKNHAIYEKAKEVSSALSKVLSKIDDTSAELLTDDISDLKNNNDITAENNNIYKAAKDVTTSLSKVLKNINKD

SEQ ID NO: 999 - protein, 580 aa, Shigella flexneri
MHNVSTTTTGFPLAKILASTELGDNTIQAANDAANKLFSLTIADLTANQNINTTNAHSTSNILIPELKAPKSLNASSQLTLLIGNLIQILGEKSLTALTNKITAWKSQQQARQQKNLEFSDKINTLLSETEGLTRDYEKQINKLKNADSKIKDLENKINQIQTRLSELDPESPEKKKLSREEIQLTIKKDAAVKDRTLIEQKTLSIHSKLTDKSMQLEKEIDSFSAFSNTASAEQLSTQQKSLTGLASVTQLMATFIQLVGKNNEESLKNDLALFQSLQESRKTEMERKSDEYAAEVRKAEELNRVMGCVGKILGALLTIVSVVAAAFSGGASLALAAVGLALMVTDAIVQAATGNSFMEQALNPIMKAVIEPLIKLLSDAFTKMLEGLGVDSKKAKMIGSILGAIAGALVLVAAVVLVATVGKQAAAKLAENIGKIIGKTLTDLIPKFLKNFSSQLDDLITNAVARLNKFLGAAGDEVISKQIISTHLNQAVLLGESVNSATQAGGSVASAVFQNSASTNLADLTLSKYQVEQLSKYISEAIEKFGQLQEVIADLLASMSNSQANRTDVAKAILQQTTA

SEQ ID NO: 1000 - protein, 382 aa, Shigella flexneri
MLQKQFCNKLLLDTNKENVMEIQNTKPTQILYTDISTKQTQSSSETQKSQNYQQIAAHIPLNVGKNPVLTTTLNDDQLLKLSEQVQHDSEIIARLTDKKMKDRSEMSHTLTPENTLDISSLSSNAVSLIISVAVLLSALRTAETKLGSQLSLIAFDATKSAAENIVRQGLAALSSSITGAVTQVGITGIGAKKTHSGISDQKGALRKNLATAQSLEKELAGSKLGLNKQIDTNITSPQTNSSTKFLGKNKLAPDNISLSTEHKTSLSSPDISLQDKIDTQRRTYELNTLSAQQKQNIGRATMETSAVAGNISTSGGRYASALEEEEQLISQASSKQAEEASQVSKEASQATNQLIQKLLNIIDSINQSKNSTASQIAGNIRA

SEQ ID NO: 1001 - protein, 332 aa, Shigella flexneri
MNITTLTNSISTSSFSPNNTNGSSTETVNSDIKTTTSSHPVSSLTMLNDTLHNIRTTNQALKKELSQKTLTKTSLEEIALHSSQISMDVNKSAQLLDILSRHEYPINKDARELLHSAPKEAELDGDQMISHRELWAKIANSINDINEQYLKVYEHAVSSYTQMYQDFSAVLSSLAGWISPGGNDGNSVKLQVNSLKKALEELKEKYKDKPLYPANNTVSQEQANKWLTELGGTIGKVSQKNGGYVVSINMTPIDNMLKSLDNLGGNGEVVLDNAKYQAWNAGFSAEDETMKNNLQTLVQKYSNANSIFDNLVKVLSSTISSCTDTDKLFLHF

SEQ ID NO: 1002 - protein, 582 aa, Shigella flexneri
LIRILVIMIKSTNIQAIGSGIMHQINNVYSLTPLSLPMELTPSCNEFYLKTWSEWEKNGTPGEQRNIAFNRLKICLQNQEAELNLSELDLKTLPDLPPQITTLEIRKNLLTHLPDLPPMLKVIHAQFNQLESLPALPETLEELNAGDNKIKELPFLPENLTHLRVHNNRLHILPLLPPELKLLVVSGNRLDSIPPFPDKLEGLALANNFIEQLPELPFSMNRAVLMNNNLTTLPESVLRLAQNAFVNVAGNPLSGHTMRTLQQITTGPDYSGPQIFFSMGNSATISAPEHSLADAVTAWFPENKQSDVSQIWHAFEHEEHANTFSAFLDRLSDTVSARNTSGFREQVAAWLEKLSASAELRQQSFAVAADATESCEDRVALTWNNLRKTLLVHQASEGLFDNDTGALLSLGREMFRLEILEDIARDKVRTLHFVDEIEVYLAFQTMLAEKLQLSTAVKEMRFYGVSGVTANDLRTAEAMVRSREENEFTDWFSLWGPWHAVLKRTEADRWAQAEEQKYEMLENEYSQRVADRLKASGLSGDADAEREAGAQVMRETEQQIYRQLTDEVLALRLSENGSNHIA

SEQ ID NO: 1003 - protein, 574 aa, Shigella flexneri
MKPINNHSFFRSLCGLSCISRLSVEEQCTRDYHRIWDDWAREGTTTENRIQAVRLLKICLDTREPVLNLSLLKLRSLPPLPLHIRELNISNNELISLPENSPLLTELHVNGNNLNILPTLPSQLIKLNISFNRNLSCLPSLPPYLQSLSARFNSLETLPELPSTLTILRIEGNRLTVLPELPHRLQELFVSGNRLQELPEFPQSLKYLKVGENQLRRLSRLPQELLALDVSNNLLTSLPENIITLPICTNVNISGNPLSTHVLQSLQRLTSSPDYHGPQIYFSMSDGQQNTLHRPLADAVTAWFPENKQSDVSQIWHAFEHEEHANTFSAFLDRLSDTVSARNTSGFREQVAAWLEKLSASAELRQQSFAVAADATESCEDRVALTWNNLRKTLLVHQASEGLFDNDTGALLSLGREMFRLEILEDIARDKVRTLHFVDEIEVYLAFQTMLAEKLQLSTAVKEMRFYGVSGVTANDLRTAEAMVRSREENEFTDWFSLWGPWHAVLKRTEADRWAQAEEQKYEMLENEYSQRVADRLKASGLSGDADAEREAGAQVMRETEQQIYRQLTDEVLA

SEQ ID NO: 1004 - protein, 565 aa, Shigella flexneri
MFSVNNTHSSVSCSPSINSNSTSNEHYLRILTEWEKNSSPGEERGIAFNRLSQCFQNQEAVLNLSDLNLTSLPELPKHISALIVENNKLTSLPKLPAFLKELNADNNRLSVIPELPESLTTLSVRSNQLENLPVLPNHLTSLFVENNRLYNLPALPEKLKFLHVYYNRLTTLPDLPDKLEILCAQRNNLVTFPQFSDRNNIRQKEYYFHFNQITTLPESFSQLDSSYRINISGNPLSTRVLQSLQRLTSSPDYHGPQIYFSMSDGQQNTLHRPLADAVTAWFPENKQSDVSQIWHAFEHEEHANTFSAFLDRLSDTVSARNTSGFREQVAAWLEKLSASAELRQQSFAVAADATESCEDRVALTWNNLRKTLLVHQASEGLFDNDTGALLSLGREMFRLEILEDIARDKVRTLHFVDEIEVYLAFQTMLAEKLQLSTAVKEMRFYGVSGVTANDLRTAEAMVRSREENEFTDWFSLWGPWHAVLKRTEADRWAQAEEQKYEMLENEYSQRVADRLKASGLSGDADAEREAGAQVMRETEQQIYRQLTDEVLALRLSENGSRLHHS

SEQ ID NO: 1005 - protein, 555 aa, Shigella flexneri
LSTGFNWMPIMLPINNNFSLPQNSFYNTISGTYADYFSAWDKWEKQALPGEERDEAVSRLKECLINNSDELRLDRLNLSSLPDNLPAQITLLNVSYNQLTNLPELPVTLKKLYSASNKLSELPVLPPALESLQVQHNELENLPALPDSLLTMNISYNEIVSLPSLPQALKNLRATRNFLTELPAFSEGNNPVVREYFFDRNQISHIPESILNLRNECSIHISDNPLSSHALPALQRLTSSPDYHGPRIYFSMSDGQQNTLHRPLADAVTAWFPENKQSDVSQIWHAFEHEEHANTFSAFLDRLSDTVSARNTSGFREQVAAWLEKLSASAELRQQSFAVAADATESCEDRVALTWNNLRKTLLVHQASEGLFDNDTGALLSLGREMFRLEILEDIARDKVRTLHFVDEIEVYLAFQTMLAEKLQLSTAVKEMRFYGVSGVTANDLRTAEAMVRSREENEFTDWFSLWGPWHAVLKRTEADRWAQAEEQKYEMLENEYPQRVADRLKASGLSGDADAEREAGAQVMRETEQQIYRQLTDEVLALRLPENGSQLHHS

SEQ ID NO: 1006 - protein, 83 aa, Shigella flexneri
MSVTVPNDDWTLSSLSETFDDGTQTLQGELTLALDKLAKNPSNPQLLAEYQSKLSEYTLYRNAQSNTVKVIKDVDAAIIQNFR

SEQ ID NO: 1007 - protein, 1364 aa, Shigella flexneri
MNKIYYLKYCHITKSLIAVSELARRVTCKSHRRLSRRVILTSVAALSLSSAWPALSATVSAEIPYQIFRDFAENKGQFTPGTTNISIYDKQGNLVGKLDKAPMADFSSATITTGSLPPGDHTLYSPQYVVTAKHVSGSDTMSFGYAKNTYTAVGTNNNSGLDIKTRRLSKLVTEVAPAEVSDIGAVSGAYQAGGRFTEFYRLGGGMQYVKDKNGNRTQVYTNGGFLVGGTVSALNSYNNGQMITAQTGDIFNPANGPLANYLNMGDSGSPLFAYDSLQKKWVLIGVLSSGTNYGNNWVVTTQDFLGQQPQNDFDKTIAYTSGEGVLQWKYDAANGTGTLTQGNTTWDMHGKKGNDLNAGKNLLFTGNNGEVVLQNSVNQGAGYLQFAGDYRVSALNGQTWMGGGIITDKGTHVLWQVNGVAGDNLHKTGEGTLTVNGTGVNAGGLKVGDGTVILNQQADADGKVQAFSSVGIASGRPTVVLSDSQQVNPDNISWGYRGGRLELNGNNLTFTRLQAADYGAIITNNSEKKSTVTLDLQTLKASDINVPVNTVSIFGGRGAPGDLYYDSSTKQYFILKASSYSPFFSDLNNSSVWQNVGKDRNKAIDTVKQQKIEASSQPYMYHGQLNGNMDVNIPQLSGKDVLALDGSVNLPEGSITKKSGTLIFQGHPVIHAGTTTSSSQSDWETRQFTLEKLKLDAATFHLSRNGKMQGDINATNGSTVILGSSRVFTDRSDGTGNAVFSVEGSATATTVGDQSDYSGNVTLENKSSLQIMERFTGGIEAYDSTVSVTSQNAVFDRVGSFVNSSLTLGKGAKLTAQSGIFSTGAVDVKENASLTLTGMPSAQKQGYYSPVISTTEGINLEDNASFSVKNMGYLSSDIHAGTTAATINLGDSDADAGKTDSPLFSSLMKGYNAVLRGSITGAQSTVNMINALWYSDGKSEAGALKAKGSRIELGDGKHFATLQVKELSADNTTFLMHTNNSRADQLNVTDKLSGSNNSVLVDFLNKPASEMSVTLITAPKGSDEKTFTAGTQQIGFSNVTPVISTEKTDDATKWVLTGYQTTADAGASKAAKDFMASGYKSFLTEVNNLNKRMGDLRDTQGDAGVWARIMNGTGSADGDYSDNYTHVQIGVDRKHELDGVDLFTGALLTYTDSNASSHAFSGKNKSVGGGLYASALFNSGAYFDLIGKYLHHDNQHTANFASLGTKDYSSHSWYAGAEVGYRYHLTKESWVEPQIELVYGSVSGKAFSWEDRGMALSMKDKDYNPLIGRTGVDVGRAFSGDDWKITARAGLGYQFDLLANGETVLQDASGEKRFEGEKDSRMLMTVGMNAEIKDNMRLGLELEKSAFGKYNVDNAINANFRYVF

SEQ ID NO: 1008 - protein, 938 aa, Shigella flexneri
MSDYKSTLNLPETGFPMRGDLAKREPGMLARWTDDDLYGIIRAAKKGKKTFILHDGPPYANGSIHIGHSVNKILKDIIVKSKGLSGYDSPYVPGWDCHGLPIELKVEQEYGKPGEKFTAAEFRAKCREYAATQVDGQRKDFIRLGVLGDWSHPYLTMDFKTEANIIRALGKIIGNGHLHKGAKPVHWCVDCRSALAEAEVEYYDKTSPSIDVAFQAVDQDALKAKFGVSNVNGPISLVIWTTTPWTLPANRAISIAPDFDYALVQIDGQAVILAKDLVESVMQRIGVTDYTILGTVKGAELELLRFTHPFMGFDVPAILGDHVTLDAGTGAVHTAPGHGPDDYVIGQKYGLETANPVGPDGTYLPGTYPTLDGVNVFKANDIVVALLQEKGALLHVEKMQHSYPCCWRHKTPIIFRATPQWFVSMDQKGLRAQSLKEIKGVQWLPDWGQARIESMVANRPDWCISRQRTWGVPMSLFVHKDTEELHPRTLELMEEVAKRVEVDGIQAWWDLDAKEILGDEADQYVKVPDTLDVWFDSGSTHSSVVDVRPEFAGHAADMYLEGSDQHRGWFMSSLMISTAMKGKAPYRQVLTHGFTVDGQGRKMSKSIGNTVSPQDVMNKLGADILRLWVASTDYTGEMAVSDEILKRAADSYRRIRNTARFLLANLNGFDPAKDMVKPEEMVVLDRWAVGCAKAAQEDILKAYEAYDFHEVVQRLMRFCSVEMGSFYLDIIKDRQYTAKADSVARRSCQTALYHIAEALVRWMAPILSFTADEVWGYLPGEREKYVFTGEWYEGLFGLADSEAMNDAFWDELLKVRGEVNKVIEQARADKKVGGSLEAAVTLYAEPELAAKLTALGDELRFVLLTSGATVADYNDAPADAQQSEVLKGLKVALSKAEGEKCPRCWHYTQDVGKVAEHAEICGRCVSNVAGDGEKRKFA

SEQ ID NO: 1009 - protein, 166 aa, Shigella flexneri
LPCFTAMRAEIALMSGSAFAVTHHAFSSGAGRTSDGNGSHASTLKSPSYTKSVSWQHYPTKVGTENGQLLGNTLTGNDAAKGVGVLIEGLATSKNPLMTLKPNDSNSVYKDYDPRGKDDTTGGVYPDQDTGITYPLHFQATLQQDGTIPIEAGEFKATSTFQVTYP

SEQ ID NO: 1010 - protein, 281 aa, Shigella flexneri
MALSPLLWQMNTAHAAAIDPNRIVALEWLPVELLLALGIVPYGVADTINYRLWVSEPPLPDSVIDVGLRTEPNLELLTEMKPSFMVWSAGYGPSSEMLARIAPGRGFNFSDGKHPLAMARKSLTEMADLLNLQSAAETHLAQYEDFIRSMKPRFVKRGARPLLLTTLIDPRHMLVFGPNSLFQEILDEYGIPNAWQGETNFWGSTAVSIDRLAAYKDVDVLCFDHDNSKDMDALMATPLWQAMPFVRTGRFQRVPAVWFYGATLSAMHFVRVLDNAIGGKA

SEQ ID NO: 1011 - protein, 762 aa, Shigella flexneri
VIEDGSPNVFLGGGTQTVLEISPEIPDWLRQVVDVLYVVAGMLGGLAGAWRQAAKMGSKFGTKCAAKFIGGEMVGMAISDTVMGLFSNPVDVTTGQKILLPETDFTLPGRLPVTCSRFYASHLETEGLLGRGWRLNWEINLREDETYITFIGVQGRELSYPKEMLIPGHQIFDPEEQFYLSRLHDGCYVLHYTDRSYYVFDEFDDHGVAPLLFMETPYRQRIAFGRENGRLVRVASSSGHHLLLHRTMTQAGERLSHIELLKGGRPGNLVEYRYDDNGQLTGVVNRAGVTVRQFAYENGLMTEHRNATGFTCTYHWEEIEGFPRVVEHTTSDGEDYRFHYDFAGGQTVVTGRPEQKWQWWFDEETYVTAHRTPGGGMYRFTYNENHFPVAVELPGERRVTLEYDTLSRVVKETDPAGRVTQTQWNGSFAEITRRALDDDHVWKADYNEHGQVIRETDPEGRVTRYGYDDQGLPETVCHPGKQQDRYTWNALGLLSSHRRITGSVQSWQYTQRGMLARHTDEEKRETRWQYTPEGLVASLSNGNGAQYRFSYDGDGRLTGEQRPDGLIRMFALNADGFPVIIPTQGTEGGVRNEQQERDALGRLLRSDTQHSTRTFSYNRLDQITEVTLTPTEEGERLHHMQADTVRFAYDRSGWLTAEHSVHGSIKYRRDALGNPTDITLPDGQHLSHLYYGSGHLLQTALDGITVSEYERDSLHRQVIRTQGKLATFSGYNADNRLSWQRSLPGGSQNPQQAVLPRRRTTA

SEQ ID NO: 1012 - protein, 587 aa, Shigella flexneri
MKPAHNPSFFRSFCGLGCISRLSVEEQNITDYHRIWDNWAKEGAATEDRTQAVRLLKICLAFQEPALNLSLLRLRSLPYLPPHIQELNISSNELRSLPELPPSLTVLKASDNRLSRLPALPPHLVALDVSLNRVLTCLPSLPSSLQSLSALLNSLETLPDLPPALQKLSVGNNQLTALPELPCELQELSAFDNRLQELPPLPQNLRLLNVGENQLHRLPELPQRLQSLYIPNNQLNTLPDSIMNLHIYADVNIYNNPLSTRTLQALQRLTSSPDYHGPRIYFSMSDGQQNTLHRPLADAVTAWFPENKQSDVSQIWHAFEHEEHANTFSAFLDRLSDTVSARNTSGFREQVAAWLEKLSASAELRQQSFAVAADATESCEDRVALTWNNLRKTLLVHQASEGLFDNDTGALLSLGREMFRLEILEDIARDKVRTLHFVDEIEVYLAFQTMLAEKLQLSTAVKEMRFYGVSGVTANDLRTAEAMVRSREENEFTDWFSLWGPWHAVLKRTEADRWALAEEQKYEMLENEYPQRVADRLKASGLSGDADAEREAGAQVMRETEQQIYRQLTDEVLALRLPENGSQLHHS

SEQ ID NO: 1013 - protein, 583 aa, Shigella flexneri
VTRQDMNDAVITLNGLEKRFPGMDKPAVAPLDCTIHAGYVTGLVGPDGAGKTTLMRMLAGLLKPDSGSATVIGFDPIKNDGALHAVLGYMPQKFGLYEDLTVMENLNLYADLRSVTGEARKQTFARLLEFTSLGPFTGRLAGKLSGGMKQKLGLACTLVGEPKVLLLDEPGVGVDPISRRELWQMVHELAGEGMLILWSTSYLDEAEQCRDVLLMNEGELLYQGEPKALTQTMAGRSFLMTSPHEGNRKLLQRALKLPQVSDGMIQGKSVRLILKKEATPDDIRHADGMPEININETTPRFEDAFIDLLGGAGTSESPLGAILHTVEGTPGETVIEAKELTKKFGDFAATDHVNFAVKRGEIFGLLGPNGAGKSTTFKMMCGLLVPTSGQALVLGMDLKESSGKARQHLGYMAQKFSLYGNLTVEQNLRFFSGVYGLRGRAQNEKISRMSEAFGLKSIASHATDELPLGFKQRLALACSLMHEPDILFLDEPTSGVDPLTRREFWLHINSMVEKGVTVMVTTHFMDEAEYCDRIGLVYRGKLIASGTPDDLKAQSANDEQPDPTMEQAFIQLIHDWDKEHSNE

SEQ ID NO: 1014 - protein, 173 aa, Shigella flexneri
VVMKKIACLSALAAVLAFTAGTSVAATSTVTGGYAQSDAQGQMNKMGGFNLKYRYEEDNSPLGVIGSFTYTEKSRTASSGDYNKNQYYGITAGPAYRINDWASIYGVVGVGYGKFQTTEYPTYKHDTSDYGFSYGAGLQFNPMENVALDFSYEQSRIRSVDVGTWIAGVGYRF

SEQ ID NO: 1015 - protein, 243 aa, Shigella flexneri
MKKVLIAALIAGFSLSATAAETIRFATEAPYPPFESIDANNQIVGFDVDLAQALCKEIDATCTFSNQAFDSLIPSLKFRRVEAVMAGMDITPEREKQVLFTTPYYDNSALFVGQQGKYTSVDQLKGKKVGVQNGTTHQKFIMDKHPEITTVPYDSYQNAKLDLQNGRIDSVFGDTAVVTEWLKDNPKLAAVGDKVTDKDYFGTGLGIAVRQGNTELQQKLNTALEKVKKDGTYETIYNKWFQK

SEQ ID NO: 1016 - protein, 698 aa, Shigella flexneri
MKKNSYLLSCLAIAVSSACHAEVLTYPDPLGSSQSDFGGTGLLQMPNARIAPEGEFSVNYRDNDQYRFYSTSVALFPWLEGTIRYTDVRTRKYSQWEDFSGDQSYKDKSFDFKLRLWEEGYWLPQVAFGKRDIAGTGLFDGEYLVASKQAGPFDFTLGMAWGYAGNAGNITNPFCRVSDKYCHRAESHDAGDISFSDIFRGPASIFGGIEYQTPWNPLRLKLEYDGNNYQNDFAGKLPQASHFNVGAVYRAASWADLNLSYERGNTLMFGFTLRTNFNDLRPALRDTPKPAWQPAPESEGLQYTTVANQLTALKYNAGFDAPEIQLRDKTLYMSGQQYKYRDSREAVDRANRILVNNLPQGVEKISVTQKREHMAMVTTETDVASLRKQLAGTAPGKSEQLQQQRVEAEDLSAFGRCYRIREDRFSYSFNPTLSQSLGGPEDFYMFQLGLMSSARYWFTDHLLLDDGIFTNIYNNYDKFKSSLLPADSTLPRVRTHIRDYVRNDVYLNNLQANYFADLGNGFYGQVYGGYLETMYAGVGSELLYRPLDASWALGVDVNYVKQRDWDNMMRFTDYSTPTGFVTAYWNPPTLNGVLMKLSVGQYLAKDKGATIDVAKLFDSGVAVGVWAAISNVSKDDYGEGGFSKGFYISIPFDLMTIGPNRNRAVVSWTPLTRDGGQMLSRKYQLDPMTAEREVPVGQ

SEQ ID NO: 1017 - protein, 236 aa, Shigella flexneri
LMTKRWLSGTPRSTPRPLTGVNKEKAMSLSRTQIVNWLTRCGDIFNTESEYLTGLDREIGDADHGLNMNRGFSKVVEKLPAIADKDIGFILKNTGMTLLSSVGGASGPLFGTFFIRAAQATQARQSLTLEELYQMFRDGADGVISRGKAEPGDKTMCDVWVPVVESLRQSSEQNLSVPVALEAASSIAESAAQSTITMQARKGRASYLGERSIGHQDPGATSVMFMMQMLALAAKE

SEQ ID NO: 1018 - protein, 571 aa, Shigella flexneri
MSIMLPINNNFSLSQNSFYNTISGTYADYFSAWDKWEKQALPGENRNEAVSLLKECLINQFSELQLNRLNLSSLPDNLPPQITVLEITQNALISLPELPASLEYLDACDNRLSTLPELPASLKHLDVDNNQLTMLPELPALLEYINADNNQLTMLPELPTSLEVLSVRNNQLTFLPELPESLEALDVSTNLLESLPAVPVRNHHSEETEIFFRCRENRITHIPENILSLDPTCTIILEDNPLSSRIRESLSQQTAQPDYHGPRIYFSMSDGQQNTLHRPLADAVTAWFPENKQSDVSQIWHAFEHEEHANTFSAFLDRLSDTVSARNTSGFREQVAAWLEKLSTSAELRQQSFAVAADATESCEDRVALTWNNLRKTLLVHQASEGLFDNDTGALLSLGREMFRLEILEDIARDKVRTLHFVDEIEVYLAFQTMLAEKLQLSTAVKEMRFYGVSGVTANDLRTAEAMVRSREENEFTDWFSLWGPWHAVLKRTEADRWAQAEEQKYEMLENEYSQRVADRLKASGLSGDADAEREAGAQVMRETEQQIYRQVTDEVLALRLSENGSQLHHS

SEQ ID NO: 1019 - protein, 388 aa, Shigella flexneri
VIQFRVVWVDDRNQIQVNRAWRVQFSSAIGPYKGGMRFHPSVNLSILKFLGFEQTFKNALTTLPMGGGKGGSDFDPKGKSEGKVMRFCQTLMTELYRHLGADTDVPAGDIGVGGREVGFMAGMMKKLSNNTACVFTGKGLSFGGSLIRPEATGYGLVYFTEAMLKRHGMGFEGMSVSVSGSGNVAQYAIEKAMEFGARVITASDSSGTVVDESGFTKEKLARLIEIKASRDGRAADYAKEFGLVYLEGQQPWSVPVDIALPCATQNELDVDAAHQLIANGVKAVAEGANMPTTIEATELFQQAGVLFAPGKAANAGGVATSGLEMAQNAARLGWKAEKVDARLHHIMLDIHHACVEHGGEGEQTNYVQGANIAGFVKVADAMLAQGVI

SEQ ID NO: 1020 - protein, 544 aa, Shigella flexneri
MSVRGKLMKHSVSVTCCALLVSSISLSYAAEVPSGTVLAEKQELVRHIKDEPASLDPAKAVGLPEIQVIRDLFEGLVNQNEKGEIVPGVATQWKSNDNRIWTFTLRDNAKWADGTPVTAQDFVYSWQRLVDPKTLSPFAWFAALAGINNAQAIIDGKATPDQLGVTAVDAHTLKIQLDKPLPWFVNLTANFAFFPVQKANVESGKEWTKPGNLIGNGAYVLKERVVNEKLVVVPNTHYWDNAKTVLQKVTFLPINQESAATKRYLAGDIDITESFPKNMYQKLLKDIPGQVYTPPQLGTYYYAFNTQKGPTADQRVRLALSMTIDRRLMTEKVLGTGEKPAWHFIPDVTAGFTPEPSPFEQMSQEELNAQAKTLLSAAGYGPQKPLKLTLLYNTSENHQKIAIAVASMWKKNLGVDVKLQNQEWKTYIDSRNTGNFDVIRASWVGDYNEPSTFLTLLTSMHSGNISRFNNPAYDKVLAQASTENTVKARNADYNAAEKILMEQAPIAPIYQYTNGRLIKPWLKGYPINNPEDVAYSRTMYIVKH

SEQ ID NO: 1021 - protein, 583 aa, Shigella flexneri
MLPTNNNHRLISNSFSTYSIDTSRAYENYLTHWTEWKNNRIQEEQRDIAFQRLVSCLQNQETNLDLSELGLTTLPEIPPGIKSINISKNNLSLISPLPASLTQLNVSYNRLIELPALPQGLKLLNASHNQLITLPTLPISLKELHVSNNQLCSLPVLPELLETLDVSCNGLAVLPPLPFSLQEISAIGNLLSELPPLPHNIHSIWAIDNMLTDIPYLPENLRNGYFDINQISHIPESILNLRNECSIDISDNPLSSHALQSLQRLTSSPDYHGPQIYFSMSDGQQNTLHRPLADAVTAWFPENKQSDVSQIWHAFEHEEHANTFSAFLDRLSDTVSARNTSGFREQVAAWLEKLSASAELRQQSFAVAADATESCEDRVALTWNNLRKTLLVHQASEGLFDNDTGALLSLGREMFRLEILEDIARDKVRTLHFVDEIEVYLAFQTMLAEKLQLSTAVKEMRFYGVSGVTANDLRTAEAMVRSREENEFTDWFSLWGPWHAVLKRTEADRWALAEEQKYEMLENEYPQRVADRLKASGLSGDADAEREAGAQVMRETEQQIYRQLTDEVLALRLPENGSQLHHS

SEQ ID NO: 1022 - protein, 1013 aa, Shigella flexneri
MDQIANLVIDLGIDAAEFKNEIPRIKNLLNGAASDAERSSARMQRFMERQTQAARQTMQAASSAATAASAHAQTVEKNARAHERMAREVEQTRLRVDALNQKMREEQAQARALAEAQDKAAAAFYRQIDSVKQAGAGLQELQRIQQQIRQARNSGGVGQQDYLALISEITAKTRALTQAEEQATRQKAAFIRQLKEQATRQNLSSSELLRARAAQLGVSSAAEVYIRKMERAGKATHSLGLKSAAARRELGVLISQMARGNFGALRGSGITLANRAGWTGALMSPKGMMTGGVIGGLVAAVLGLGKAWHDGRKEGEKFNRQLALTGHYAGVTVGQLWKLSRAISGNGITQHAAAGALAQVVGSGAFHGNDIGMVAKAAAQMERSVGQSVSDTINQFKRLKDDPVNAAKALDNALHFLNATQLEQIRVLGEQGRSSDAARIAMSALAEETGKRTSDIDNNLNALGSTLQTLSDWWKQFWDAAMNIGREDSLDAQIDALQEKIQRAKKYPWTNASTQVEYDQQRLNDLQEKKRRKDLQDAKAQAERNYQEQQKRRNAENAALNRMNETEAARHQREIARINAMQYADQAVRDAAIQRENERYEKAIKKNTRATRNDEATRLLLQYSQQQAQVEGQIAAARQSAGIATERMTEAHKQLLALQQRISDLDGKKLTADEKSVLARKNELIQALTLLDVKQQELQKQTALNDLRKKTVQLTSQLADKERALREQHNLDIATAGMGDKQRQRYQAQLRIRQEYRQQLQQLENDSRQKGTYGTEDYRRAEEVLKGSLKRQLNENKRYWQELEVAQGDWKNGAMRAFQNFTADADNAAGTAEQMFTVAFSSAGNALATFCTTGKLNFKSFTSSLLSDMARIMAQMAMMQAVKGVGSLFGFTTNADGGVYQSADLSRYSGTVVNRPTFFAFAKGAGVMGEAGPEAILPLRRGADGKLGVVADTGGSGMVMFAPQYNIEINNDGTNGQIGPAALKVVYDLGKKAAADFMQQQARDGGRLSGAYR

SEQ ID NO: 1023 - protein, 550 aa, Shigella flexneri
MAQVINTNSLSLITQNNINKNQSALSSSIERLSSGLRINSAKDDAAGQAIANRFTSNIKGLTQAARNANDGISVAQTTEGALSEINNNLQRIRELTVQASTGTNSDSDLDSIQDEIKSRLDEIDRVSGQTQFNGVNVLAKDGSMKIQVGANDGQTITIDLKKIDSDTLGLNGFNVNGGGAVANTAASKADLVAANATVVGNKYTVSAGYDAAKASDLLAGVSDGDTVQATINNGFGTAASATNYKYDSASKSYSFDTTTASAADVQKYLTPGVGDTAKGTITIDGSAQDVQISSDGKITASNGDKLYIDTTGRLTKNGSGASLTEASLSTLAANNTKATTIDIGGTSISFTGNSTTPDTITYSVTGAKVDQAAFDKAVSTSGNNVDFTTAGYSVNGTTGAVTKGVDSVYVDNNEALTTSDTVDFYLQDDGSVTNGSGKAVYKDADGKLTTDAETKAATTADPLKALDEAISSIDKFRSSLGAVQNRLDSAVTNLNNTTTNLSEAQSRIQDADYATEVSNMSKAQIIQQAGNSVLAKANQVPQQVLSLLQG

SEQ ID NO: 1024 - protein, 828 aa, Shigella flexneri
MKLSRRSFMKANAVAAAAAAAGLSVPGVARAVVGQQEAIKWDKAPCRFCGTGCGVLVGTQQGRVVACQGDPDAPVNRGLNCIKGYFLPKIMYGKDRLTQPLLRMKNGKYDKEGEFTPITWDQAFDVMEEKFKTALKEKGPESIGMFGSGQWTIWEGYAASKLFKAGFRSNNIDPNARHCMASAVVGFMRTFGMDEPMGCYDDIEQADAFVLWGANMAEMHPILWSRITNSRLSNQNVTVAVLSTYQHRSFELADNGIIFTPQSDLVILNYIANYIIQNNAINQDFFSKHVNLRKGATDIGYGLRPTHPLEKAAKNPGSDASEPMSFEDYKAFVAEYTLEKTAEMTGVPKDQLEQLAQLYADPNKKVISYWTMGFNQHTRGVWANNLVYNLHLLTGKISQPGCGPFSLTGQPSACGTAREVGTFAHRLPADMVVTNEKHRDICEKKWNIPSGTIPAKIGLHAVAQDRALKDGKLNVYWTMCTNNMQAGPNINEERMPGWRDPRNFIIVSDPYPTVSALAADLILPTAMWVEKEGAYGNAERRTQFWRQQVQAPGEAKSDLWQLVQFSRRFKTEEVWPEELLAKKPELRGKTLYEVLYATPEVSKFPVSELAEDQLNDESRELGFYLQKGLFEEYAWFGRGHGHDLAPFDDYHKARGLRWPVVNGKETQWRYSEGNDPYVKAGEGYKFYGKPDGKAVIFALPFEPAAEAPDEEYDLWLSTGRVLEHWHTGSMTRRVPELHRAFPEAVLFIHPLDAKARDLRRGDKVKVVSRRGEVISIVETRGRNRPPQGLVYMPFFDAAQLVNKLTLDATDPLSKETDFKKCAVKLEKV

SEQ ID NO: 1025 - protein, 379 aa, Shigella flexneri
MSEFLPFSRPAMGVEELAAVKEVLESGWITTGPKNQALEQAFCQLTGNQHAIAVSSATAGMHITLMALEIGKGDEVITPSLTWVSTLNMISLLGATPVMVDVDRDTLMVTPEAIESAITPRTKAIIPVHYAGAPADIDAIRAIGERYGIAVIEDAAHAVGTYYKGRHIGAKGTAIFSFHAIKNITCAEGGLIVTDNENLARQLRMLKFHGLGVDAYDRQTWGRAPQAEVLTPGYKYNLTDINAAIALTQLVKLEHLNTRRREIAQQYQQALAALPFQPLSLPAWPHVHAWHLFIIRVDEQRCGISRDALMEALKERGIGTGLHFRAAHTQKYYRERFPTLSLPNTEWNSERICSLPLFPDMTTADADRVITALQQLAGQ

SEQ ID NO: 1026 - protein, 355 aa, Shigella flexneri
MVTFWGNYEGISQSAAYPESINENNNDEINGLVQEFKNLFNGKEGISTCIKHLLELIKNAIRVNDDPYRSNINNSSVTYIDIGSNDTDHITIGIDNQEPIELPANYKDKELVRTIINDNIVEKTHDINNKEMIFSALKEIYDGDPGFIFDKISHKLRHTVTEFDESGKSEPTDLFTWYGKDKKGDSLAIVIKNKNGNDYLSLGYYDQDDYHIQRGIRINGDSLTQYCSENARSASAWFESSKAIMAESFATGSDHQVVNELNGERLREPNEVFKRLGRAIRYNFQVDDAKFRRDNVKEIISTLFANKVDVDHPENKYKDFKNLEDKVEKRLQNRQTKYQNEINQLSALGVNFDDI

SEQ ID NO: 1027 - protein, 603 aa, Shigella flexneri
MLRNISSCLFPHISTITSPNHYLSEWDDWEKQGLPEEQRTEAVRRLRACLTSKGHKLDLRALALSSLPVLPACIKKLDVSCNKLTILTDLPENIKELIARDNFLTHISALPHYLITLDVSENQLENLPLLPDTIKSLSAEYNRLSTLPSLPLNLKKLEVRNNELQTLPSLPSNLKILKVAHNHLTELPPLPRRLQLLFAYSNRLSNLPNIQENIIMRRFFYFENNQITTIPTNLFRLDPHITIEIANNPLSDQTLLFLIQQTSVPNFNGPQFRISLSDQNRLFLRQMLPQNLHSRHIRVITEGGQNFQIPPLPETVAAWFPEADRREVSTQWTSFSTEENSRAFSAFLDRLSDTVSARNTSGFREQVAAWLEKLSASAELRQQSFAVAADATESCEDRVALTWNNLRKTLLVHQASEGLFDNDTGALLSLGREMFRLEILEDIARDKVRTLHFVDEIEVYLAFQTMLAEKLQLSTAVKEMRFYGVSGVTANDLRTAEAMVRSREENEFTDWFSLWGPWHAVLKRTEADRWALAEEQKYEMLENEYPQRVADRLKASGLSGDADAEREAGAQVMRETEQQIYRQLTDEVLALRLPENGSQLHHS

SEQ ID NO: 1028 - protein, 744 aa, Shigella flexneri
MVAVRSAHINKAGEFDPEKWIASLGITSQKSCECLAETWAYCLQQTQGHPDASLLLWRGVEMVEILSTLSMDIDTLRAALLFPLADANVVSEDVLRESVGKSVVNLIHGVRDMAAIRQLKATHTDSVSSEQVDNVRRMLLAMVDDFRCVVIKLAERIAHLREVKDAPEDERVLAAKECTNIYAPLANRLGIGQLKWELEDYCFRYLHPTEYKRIAKLLHERRLDREHYIEEFVGHLRAEMKAEGVKAEVYGRPKHIYSIWRKMQKKNLAFDELFDVRAVRIVAERLQDCYAALGIVHTHYRHLPDEFDDYVANPKPNGYQSIHTVVLGPGGKTVEIQIRTKQMHEDAELGVAAHWKYKEGAAAGGARSGHEDRIAWLRKLIAWQEEMADSGEMLDEVRSQVFDDRVYVFTPKGDVVDLPAGSTPLDFAYHIHSDVGHRCIGAKIGGRIVPFTYQLQMGDQIEIITQKQPNPSRDWLNPNLGYVTTSRGRSKIHAWFRKQDRDKNILAGRQILDDELEHLGISLKEAEKHLLPRYNFNDVDELLAAIGGGDIRLNQMVNFLQSQFNKPSAEEQDAAALKQLQQKSYTPQNRSKDNGRVVVEGVGNLMHHIARCCQPIPGDEIVGFITQGRGISVHRADCEQLAELRSHAPERIVDAVWGESYSAGYSLVVRVVANDRSGLLRDITTILANEKVNVLGVASRSDTKQQLATIDMTIEIYNLQVLGRVLGKLNQVPDVIDARRLHGS

SEQ ID NO: 1029 - protein, 351 aa, Shigella flexneri
LQPLRFCPGPVPGYAQYRSFSEDLSMNMEEIVALSVKHNVSDLHLCSAWPARWRIRGRMEAAPFDAPDVEELLREWLDDDQRAILLENGQLDFAVSLAENQRLRGSAFAQRQGISLALRLLPSHCPQLEQLGAPPVLPELLKSENGLILVTGATGSGKSTTLAAMVGYLNQHADAHILTLEDPVEYLYASQRCLIQQREIGLHCMTFASGLRAALREDPDVILLGELRDSETIRLALTAAETGHLVLATLHTRGAAQAVERLVDSFPAQEKDPVRNQLAGSLRAVLSQKLEVDKQEGRVALFELLINTPAVGNLIREGKTHQLPHVIQTGQKVGMLTFQQSYQQRVGEGRL

SEQ ID NO: 1030 - protein, 308 aa, Shigella flexneri
MLMTGNAWADGEPPTENILKDQFKKQYHGILKLDAISLKNLDAKGNQATWSAEGDVSSSDDLYTWVGQLADYELLEQTWTKDKPVKFSAMLTSKGTPASGWSVNFYSFQAAASDRGRVVDDIKTNNKYLIVNSEDFNYRFSQLESALNTQKNSIPALEKEVKALDKQMVAAQKAADAYWGKDANGKQMTREEAFKKIHQQRDEFNKQNDSEAFAVKYDKEVYQPAIAACHKQSEECYEVPIQQKRDFDINEQRRQTFLQSQKLSRKLQDDWVTLEKGQYPLTMKVSEINSKKVAILMKIDDINQANER

SEQ ID NO: 1031 - protein, 1285 aa, Shigella flexneri
MNKIYSLKYSHITGGLVAVSELTRKVSVGTSRKKVILGIILSSIYGSYGETAFAAMLDINNIWTRDYLDLAQNRGEFRPGATNVQLMMKDGKIFHFPELPVPDFSAVSNKGATTSIGGAYSVTATHNGTQHHAITTQSWDQTAYKASNRVSSGDFSVHRLNKFVVETTGVTESADFSLSPEDAMKRYGVNYNGKEQIIGFRAGAGTTSTILNGKQYLFGQNYNPDLLSASLFNLDWKNKSYIYTNRTPFKNSPIFGDSGSGSYLYDKEQQKWVFHGVTSTVGFISSTNIAWTNYSLFNNILVNNLKKNFTNTMQLDGKKQELSSIIKDKDLSVSGGGVLTLKQDTDLGIGGLIFDKNQTYKVYGKDKSYKGAGIDIDNNTTVEWNVKGVAGDNLHKIGSGTLDVKIAQGNNLKIGNGTVILSAEKAFNKIYMAGGKGTVKINAKDALSESGNGEIYFTRNGGTLDLNGYDQSFQKIAATDAGTTVTNSNVKQSTLSLTNTDAYMYHGNVSGNISINHIINTTQQHNNNANLIFDGSVDIKNDISVRNAQLTLQGHATEHAIFKEGNNNCPIPFLCQKDYSAAIKDQESTVNKRYNTEYKSNNQIASFSQPDWESRKFNFRKLNLENATLSIGRDANVKGHIEAKNSQIVLGNKTAYIDMFSGRNITGEGFGFRQQLRSGDSAGESSFNGSLSAQNSKITVGDKSTVTMTGALSLINTDLIINKGATVTAQGKMYVDKAIELAGTLTLTGTPTENNKYSPAIYMSDGYNMTEDGATLKAQNYAWVNGNIKSDKKASILFGVDQYKEDNLDKTTHTPLATGLLGGFDTSYTGGIDAPAASASMYNTLWRVNGQSALQSLKTRDSLLLFSNIENSGFHTVTVNTLDATNTAVIMRADLSQSVNQSDKLIVKNQLTGSNNSLSVDIQKVGNNNSGLNVDLITAPKGSNKEIFKASTQAIGFSNISPVISTKEDQEHTTWTLTGYKVAENTASSGAAKSYMSGNYKAFLTEVNNLNKRMGDLRDTNGEAGAWARIMSGAGSASGGYSDNYTHVQIGVDKKHELDGLDLFTGLTMTYTDSHASSNAFSGKTKSVGAGLYASAIFDSGAYIDLISKYVHHDNEYSATFAGLGTKDYSSHSLYVGAEAGYRYHVTEDSWIEPQAELVYGAVSGKRFDWQDRGMSVTMKDKDFNPLIGRTGVDVGKSFSGKDWKVTARAGLGYQFDLFANGETVLRDASGEKRIKGEKDGRILMNVGLNAEIRDNLRFGLEFEKSAFGKYNVDNAINANFRYSF

SEQ ID NO: 1032 - protein, 304 aa, Shigella flexneri
VELSRATLGRWTGAVAELLEPLYDVLRQYVLMPGKVHADDIPVPVQEPGSGKTRTARLWVYVRDDRNAGSQMPPAVWFAYSPDRKGIHPQNHLAGYSGVLQADAYGGYRALYESGRITEAACMAHARRKIHDVHARVPTDITTEALQRIGELYTIEAEVRGCSAEQRLAARKARAAPLMQSLYDRIQQQMKTLSRHSDTAKAFAYLLKQWKALNVYCSNGWVEIDNNIAENALRAVSLGRKNFLFFGSDHGGERGALLYSLIGTCKLNDVDPESYLRHVLGVIADWPVNRVSELLPWRIALPAE

SEQ ID NO: 1033 - protein, 470 aa, Shigella flexneri
MSLSRRQFIQASGIALCAGAVPLKASAAGQQQPLPVPPLLESRRGQPLFMTVQRAHWSFTPGTRASVWGINGRYLGPTIRVWKGDDVKLIYSNRLTENVSMTVAGLQVPGPLMGGPARMMSPNADWAPVLPIRQNAATLWYHANTPNRTAQQVYNGLAGMWLVEDEVSKSLPIPNHYGVDDFPVIIQDKRLDNFGTPEYNEPGSGGFVGDTLLVNGVQSPYVEVSRGWVRLRLLNASNSRRYQLQMSDGRPLHVISGDQGFLPAPVSVKQLSLAPGERREILVDMSNGDEVSITCGEAASIVDRIRGFFEPSSILVSTLVLTLRPTGLLPLVTDSLPMRLLPTEIMAGSPIRSRDISLGDDPGINGQLWDVNRIDVTAQQGTWERWTVRADEPQAFHIEGVMFQIRNVNGAMPFPEDRGWKDTVWVDGQVELLVYFGQPSWAHFPFYFNSQTLEMADRGSIGQLLVNPVP

SEQ ID NO: 1034 - protein, 983 aa, Shigella flexneri
LRPGNALKLNISVMRQTIRNRSGCTAENVNQARIKSLMKPLSSPLQQYWQTVVERLPELLAEESLSAQAKSVLTFSDFVQDSVIAHPEWLTELESQPPQADEWQHYSVWLQEALSNVSDEAGLMRELRLFRRRIMVRIAWAQTLALVTEESILQQLSYLAETLIVAARDWLYDACCREWGTPCNAQGEAQPLLILGMGKLGGGELNFSSDIDLIFAWPEHGCTQGGRRELDNAQFFTRMGQRLIKVLDQPTQDGFVYRVDMRLRPFGESGPLVLSFAALEDYYQEQGRDWERYAMVKARIMGDSEGVYANELRAMLRPFVFRRYIDFSVIQSLRNMKGMIAREVRRRGLTDNIKLGAGGIREIEFIVQVFQLIRGGREPLLQSRSLLPTLSAIAALHLLSENDAEQLRVAYLFLRRLENLLQSINDEQTQTLPSDELNRARLAWAMDFADWPQLTGALTAHMTNVRRVFNELIGDDESETQEESLSEQWRELWQDALQEDDTTPVLAHLSEDDRKQVLTMIADFRKELDKRTIGPRGRQVLDHLMPHLLSDVCAREDAAVTLSRITALLVGIVTRTTYLELLSEFPAALKHLISLCAASPMIASQLARYPLLLDELLDPNTLYQPTATDAYRDELRQYLLRVPEDDEEQQLEALRQFKQAQLLRIAAADIAGTLPVMKVSDHLTWLAEAMIDAVVQQAWGQMVARYGKPNHLNEREGRGFAVVGYGKLGGWELGYSSDLDLIFLHDCPMDAMTDGEREIDGRQFYLRLAQRIMHLFSTRTSSGILYEVDARLRPSGAAGMLVTSAEAFADYQKNEAWTWEHQALVRARVVYGDPQLTAHFDAVRREIMTLPREGKTLQTEVREMREKMRAHLGNKHRNRFDIKADEGGITDIEFITQYLVLRYAHEKPKLTRWSDNVRILELLAQNDIMEEQEAMALTRAYTTLRDELHHLALQELPGHVSEDCFTAERDLVRASWQKWLVEE

SEQ ID NO: 1035 - protein, 498 aa, Shigella flexneri
MAKEKRRGFFSWLGFGQKEQTPEKETEVQNEQPVVEEIVQAQEPAKASEQAVEEQPQAHTEAEAETFAADVVEVTEQVVESEKAQPEAEVVAQPEPVVEETPEPVAIEREELPLPEDVNAEEVSPEEWQAEAETVEIVEAAEEEAAKEEITDEELEAQALAAEAAEEAVMVVPPAEEEQPVAEIAQEQEKPTKEGFFARLKRSLLKTKENLGSGFISLFRGKKIDDDLFEELEEQLLIADVGVETTRKIITNLTEGASRKQLRDAEALYGLLKEEMGEILAKVDEPLNVEDKTPFVILMVGVNGVGKTTTIGKLARQFEQQGKSVMLAAGDTFRAAAVEQLQVWGQRNNIPVIAQHTGADSASVIFDAIQAAKARNIDVLIADTAGRLQNKSHLMEELKKIVRVMKKLDVEAPHEVMLTIDASTGQNAVSQAKLFHEAVGLTGITLTKLDGTAKGGVIFSVADQFGIPIRYIGVGERIEDLRPFKADDFIEALFARED

SEQ ID NO: 1036 - protein, 424 aa, Shigella flexneri
MMAGTVLYQDRAMKQITFAPRNHLLTNTNTNTNTNTNTWTPDSQWLVFDVRPSGASFTGETIERVNIHTGEVEVIYRASQGAHVGVVTVHPKSEKYVFIHGPENPDETWHYDFHHRRGVIAEGGKVSNLDAMDITAPYTPGALRGGSHVHVFSPNGERGSFTYNDHVMHQLDPALDLRNVGVAAPFGPVNVQKQHPREYSGSHWCVLVSKTTPTPQPGSDEINRAYEEGWVGNHALAFIGDTLSPKGEKVPELFIVELPQDEASWKSAGDAPLSGTETTLPAPPRGVVQRRLTFTHHRAYPGLVNVPRHWVRCNPQGTQIAFLMRDDNGIVQLWLISPQGGEPRKLTHNKTDIQSAFNWHPSGEWLGFVLDNRIVCAHAQSGEVEYLTENHANPPSADAVVFSPDGQWLAWMEGGQLWITETDR

SEQ ID NO: 1037 - protein, 255 aa, Shigella flexneri
LYMSKSDVFHLGLTKNDLQGATLAIVPGDPDRVEKIAALMDKPVKLASHREFTTWRAELDGKPVIVCSTGIGGPSTSIAVEELAQLGIRTFLRIGTTGAIQPHINVGDVLVTTASVRLDGASLHFAPLEFPAVADFECTTALVEAAKSIGATTHVGVTVSSDTFYPGQERYDTYSGRVVRHFKGSMEEWQAMGVMNYEMESATLLTMCASQGLRAGMVAGVIVNRTQQEIPNAETMKQTESHAVKIVVEAARRLL

SEQ ID NO: 1038 - protein, 349 aa, Shigella flexneri
MATGTQPDAGQILNSLINSILLIDDNLAIHYANPAAQQLLAQSSRKLFGTPLPELLSYFSLNIELMQESLEAGQGFTDNEVTLVIDGRSHILSVTAQRMPDGMILLEMAPMDNQRRLSQEQLQHAQQVAARDLVRGLAHEIKNPLGGLRGAAQLLSKALPDPSLLEYTKVIIEQADRLRNLVDRLLGPQLPGTRVTESIHKVAERVVTLVSMELPDNVRLIRDYDPSLPELAHDPDQIEQVLLNIVRNALQALGPEGGEIILRTRTAFQLTLHGERYRLAARIDVEDNGPGIPPHLQDTLFYPMVSGREGGTGLGLSIARNLIDQHSGKIEFTSWPGHTEFSVYLPIRK

SEQ ID NO: 1039 - protein, 300 aa, Shigella flexneri
MAYQSQDIIRRSATNGLTPAPQARDFQEEVAKLIDVTTCIGCKACQVACSEWNDIRDTVGNNIGVYDNPNDLSAKSWTVMRFSEVEQNDKLEWLIRKDGCMHCSDPGCLKACPAEGAIIQYANGIVDFQSEQCIGCGYCIAGCPFDIPRLNPEDNRVYKCTLCVDRVVVGQEPACVKTCPTGAIHFGTKESMKTLASERVAELKTRGYDNAGLYDPAGVGGTHVMYVLHHADKPNLYHGLPENPEISETVKFWKGIWKPLAAVGFAATFAASIFHYVGVGPNRADEEENNLHEEKDEERK

SEQ ID NO: 1040 - protein, 1353 aa, Shigella flexneri
MGRLVSELRNPMVYSYTEKKRIRKDFGKRPQVLDVPYLLSIQLDSFQKFIEQDPEGQYGLEAAFRSVFPIQSYSGNSELQYVSYRLGEPVFDVQECQIRGVTYSAPLRVKLRLVIYEREAPEGTVKDIKEQEVYMGEIPLMTDNGTFVINGTERVIVSQLHRSPGVFFDSDKGKTHSSGKVLYNARIIPYRGSWLDFEFDPKDNLFVRIDRRRKLPATIILRALNYTTEQILDLFFEKVIFEIRDNKLQMELVPERLRGETASFDIEANGKVYVEKGRRITARHIRQLEKDDVKLIEVPVEYIAGKVVAKDYIDESTGELICAANMELSLDLLAKLSQSGHKRIETLFTNDLDHGPYISETLRVDPTNDRLSALVEIYRMMRPGEPPTREAAESLFENLFFSEDRYDLSAVGRMKFNRSLLREEIEGSGILSKDDIIDVMKKLIDIRNGKGEVDDIDHLGNRRIRSVGEMAENQFRVGLVRVERAVKERLSLGDLDTLMPQDMINAKPISAAVKEFFGSSQLSQFMDQNNPLSEITHKRRISALGPGGLTRERAGFEVRDVHPTHYGRVCPIETPEGPNIGLINSLSVYAQTNEYGFLETPYRKVTDGVVTDEIHYLSAIEEGNYVIAQANSNLDEEGHFVEDLVTCRSKGESSLFSRDQVDYMDVSTQQVVSVGASLIPFLEHDDANRALMGANMQRQAVPTLRADKPLVGTGMERAVAVDSGVTAVAKRGGVVQYVDASRIVIKVNEDEMYPGEAGIDIYNLTKYTRSNQNTCINQMPCVSLGEPVERGDVLADGPSTDLGELALGQNMRVAFMPWNGYNFEDSILVSERVVQEDRFTTIHIQELACVSRDTKLGPEEITADIPNVGEAALSKLDESGIVYIGAEVTGGDILVGKVTPKGETQLTPEEKLLRAIFGEKASDVKDSSLRVPNGVSGTVIDVQVFTRDGVEKDKRALEIEEMQLKQAKKDLSEELQILEAGLFSRIRAVLVAGGVEAEKLDKLPRDRWLELGLTDEEKQNQLEQLAEQYDELKHEFEKKLEAKRRKITQGDDLAPGVLKIVKVYLAVKRRIQPGDKMAGRHGNKGVISKINPIEDMPYDENGTPVDIVLNPLGVPSRMNIGQILETHLGMAAKGIGDKINAMLKQQQEVAKLREFIQRAYDLGADVRQKVDLSTFSDEEVMRLAENLRKGMPIATPVFDGAKEAEIKELLKLGDLPTSGQIRLYDGRTGEQFERPVTVGYMYMLKLNHLVDDKMHARSTGSYSLVTQQPLGGKAQFGGQRFGEMEVWALEAYGAAYTLQEMLTVKSDDVNGRTKMYKNIVDGNHQMEPGMPESFNVLLKEIRSLGINIELEDE

SEQ ID NO: 1041 - protein, 503 aa, Shigella flexneri
MEFSVKSGSPEKQRSACIVVGVFEPRRLSPIAEQLDKISDGYISALLRRGELEGKPGQTLLLHHVPNVLSERILLIGCGKERELDERQYKQVIQKTINTLNDTGSMEAVCFLTELHVKGRNNYWKVRQAVETAKETLYSFDQLKTNKSEPRRPLRKMVFNVPTRRELTSGERAIQHGQAIAAGIKAAKDLGNMPPNICNAAYLASQARQLADSYSKNVITRVIGEQQMKELGMHSYLAVGQGSQNESLMSVIEYKGNASEDARPIVLVGKGLTFDSGGISIKPSEGMDEMKYDMCGAAAVYGVMRMVAELQLPINVIGVLAGCENMPGGRAYRPGDVLTTMSGQTVEVLNTDAEGRLVLCDVLTYVERFEPEAVIDVATLTGACVIALGHHITGLMTNHNPLAHELIAASEQSGDRAWRLPLGDEYQEQLESNFADMANIGGRPGGAITAGCFLSRFTRKYNWAHLDIAGTAWRSGKAKGATGRPVALLAQFLLNRAGFNGEE

SEQ ID NO: 1042 - protein, 187 aa, Shigella flexneri
MPLLDKLREQYGVGPVCSELHIAPSTYYHCQQQRHHHDKRSARAQRDDWLKKEILRVYDENHQVYAVRKVWHQLLREGIRVARCTVARLMAVMGLAGVLRGKKVHTTVSRKAVAAGDRVNRHQGNVPRTPGGPQRLVYVVSAADKDKHTSAVPSALRQRCPQGFYPVQRYGAPRLTDELCALVTTLT

SEQ ID NO: 1043 - protein, 272 aa, Shigella flexneri
MCQVFGVSRSGYYNWVQHEPSDRKQSDERLKLEIKVAHIRTRETYGTRRLQTELAENGIIVGRDRLACLRKELRLRCKQKRKFRATTNPNHNLPVAPNLLNQTFAPTAPNQVWVADLTYVATQEGWLYLAGIKDVYTCEIVGYAMGERMTKELTGKALFMALRSQRPPAGLIHHSDRGSQYCAYDYRVIQEQSGLKTSMSRKGNCYDNAPMESFWGTLKNESLSHYRFNNRDEAISVIREYIEIFYNRQRRHSRLGNISPAAFREKYHQMAA

SEQ ID NO: 1044 - protein, 93 aa, Shigella flexneri
KTSPGCAVSASRPAHAVSAFPSPFLPFCGPGNGSSGSPLRCNVPAGRPLSAASSDNDPGSAPYSSRRPFFSTCTHASIFLRLSAPGFSSVIPS

SEQ ID NO: 1045 - protein, 1102 aa, Shigella flexneri
MNQIHKFFCNMTQCSQGGAGELPTVKEKTCKLSFSPFVVGASLLLGGPIAFATPLSGTQELHFSEDNYEKLLTPVDGLSPLGAGEDGMDAWYITSSNPSHASRTKLRINSDIMISAGHGGAGDNNDGNSCGGNGGDSITGSDLSIINQGMILGGSGGSGADHNGDGGEAVTGDNLFIINGEIISGGHGGDSYSDSDGGNGGDAVTGVNLPIINKGTISGGNGGNNYGEGDGGNGGDAITGSSLSVINKGTFAGGNGGAAYGYGYDGYGGNAITGDNLSVINNGAILGGNGGHWGDAINGSNMTIANSGYIISGKEDDGTQNVAGNAIHITGGNNSLILHEGSVITGDVQVNNSSILKIINNDYTGTTPTIEGDLCAGDCTTVSLSGNKFTVSGDVSFGENSSLNLAGISSLEASGNMSFGNNVKVEAIINNWAQKDYKLLSADKGITGFSVSNISIINPLLTTGAIDYTKSYISDQNKLIYGLSWNDTDGDSHGEFNLKENAELTVSTILADNLSHHNINSWDGKSLTKSGEGTLILAEKNTYSGFTNINAGILKMGTVEAMTRTAGVIVNKGATLNFSGMNQTVNTLLNSGTVLINNINAPFLPDPVIVTGNMTLEKNGHVILNNSSSNVGQTYVQKGNWHGKGGILSLGAVLGNDNSKTDRLEIAGHASGITYVAVTNEGGSGDKTLEGVQIISTDSSDKNAFIQKGRIVAGSYDYRLKQGTVSGLNTNKWYLTSQMDNQESKQMSNQESTQMSSRRASSQLVSSLNLGEGSIHTWRPEAGSYIANLIAMNTMFSPSLYDRHGSTIVDPTTGQLSETTMWIRTVGGHNEHNLADRQLKTTANRMVYQIGGDILKTNFTDHDGLHVGIMGAYGYQDSKTHNKYTSYSSRGTVSGYTAGLYSSWFQDEKERTGLYMDAWLQYSWFNNTVKGDGLTGEKYSSKGITGALEAGYIYPTIRWTAHNNIDNALYLNPQVQITRHGVKANDYIEHNGTMVTSSGGNNIQAKLGLRTSLISQSCIDKETLRKFEPFLEVNWKWSSKQYGVIMNGMSNHQIGNRNVIELKTGVGGRLADNLSIWGNVSQQLGNNSYRDTQGILGVKYTF

SEQ ID NO: 1046 - protein, 179 aa, Shigella flexneri
FHYHGSSYIWFCCRDTRHCRARIAVITDYRDGIKPAHWGKITPRFRSAGGLLRHLPERRLHHRARRAAAAYPCRFTGRRRAWPCRGVNANPHPKPTCRPRLAWRERRSQLCHCAGCGAVWLLIRTGTTGDGLRRGAGGLIDCCLYRQSGWRAVKSGAFNPGGRGAGGGAGRTDQRHRPA

SEQ ID NO: 1047 - protein, 78 aa, Shigella flexneri
FIVPDVRKPYYCLPTTAIFFMTIRAGQAQSLSYVATHPRRKLLLKPTRRKRLSPRYAHNQTYFSSTNLVRNRQLKLRK

SEQ ID NO: 1048 - protein, 116 aa, Shigella flexneri
NKSPQKCSAKSTQKFLKAQQSGRKLTSHDPIPTVGRRTQPIFAYRLSLMKCRQHQHQWKIFTVRGSSQCWGIQSPLTISLRRAVLSPTAQRVDIYKVGVLSEKTLTPTVRGVVTMK

SEQ ID NO: 1049 - protein, 23 aa, Shigella flexneri
LSAGDASLRRDVSRQSAARATHP

SEQ ID NO: 1050 - protein, 96 aa, Shigella flexneri
TAGCVLCRTRPSRRGADCQRRHCTRFNRRWHGRWRNAQRRQPDPTPSHHYRSRTSGRRQNRPANFAYRALQLPTASGRTVRIAGPHQPFRSSRTHP

SEQ ID NO: 1051 - protein, 57 aa, Shigella flexneri; identical to SEQ ID NO: 518

SEQ ID NO: 1052 - protein, 47 aa, Shigella flexneri
MVKRDPPRGHCWAGRVVCGDGDSRLWARDCRRQTNAAGKRQCTYSRS

SEQ ID NO: 1053 - protein, 99 aa, Shigella flexneri
SKANRKPCDRHIRLQYWASDSARKTGKPMASSPPPRCGKISSSLSRPSAAGYDPFPAKSSKRLPNALSASLAFAHLQLNNRLNFSPVAISKKCCFHVGY

SEQ ID NO: 1054 - protein, 40 aa, Shigella flexneri
CGEGTRRAPTSHPCSNNMQDLLICGANTRFRVACFYLMIR

SEQ ID NO: 1055 - protein, 69 aa, Shigella flexneri
NVQYPVVPARGETGKTAPVFISKVAKGACDRFFDHHFTQLTHDQKGDKTSNGVTQDNPWPCGLYYGGAT

SEQ ID NO: 1056 - protein, 48 aa, Shigella flexneri
HSGLAQPSSASRTLPSESGIRAESKVAPQSISVTTIPALLRKVNSRYG

SEQ ID NO: 1057 - protein, 197 aa, Shigella flexneri
VLVRIAPVVYDSYSVLTQYHQERYSATGPSARAGIKVSAPTSNTVPINRPTNSGPCVGSVPELAGWLFLLTSEPAIAITGIITPKRPTNMQNASKQFQNGELALNPAKALPLLLAADDTAYSTSLKPCGLGLSMALRPASVIIANAAPISTSVGVTRIASAVSFISRTSIFLPRYSGVRPIISPAINTASRTNSIMP

SEQ ID NO: 1058 - protein, 30 aa, Shigella flexneri
PVPPVQRKTVHQDAVIHHWYAPQSSQKRRW

SEQ ID NO: 1059 - protein, 36 aa, Shigella flexneri
PTATGNRVDKSRQHGDKKENSQQQRRNHKQAIKRFH

SEQ ID NO: 1060 - protein, 44 aa, Shigella flexneri
RLSPAAEYLPDARVVAAGESGIRSGGNRDRYGTLGRRPFFSDRG

SEQ ID NO: 1061 - protein, 139 aa, Shigella flexneri; identical to SEQ ID NO: 476

SEQ ID NO: 1062 - protein, 38 aa, Shigella flexneri
PNSARKWVISPRPGLNRKIHNTAATAGATAYGSNIKVW

SEQ ID NO: 1063 - protein, 75 aa, Shigella flexneri
SQPRLAWRHSPAVARSPGALPPRVWSPASVQAPVIHRHQDPAPPATERHASLFSPARFSAYAGTSDRDRPPAGVG

SEQ ID NO: 1064 - protein, 45 aa, Shigella flexneri
ATPARRFAGATHPGDANNVKIRHRLTFPFDRPSTPRVRHRYSADR

SEQ ID NO: 1065 - protein, 60 aa, Shigella flexneri
RSLFISAGSISIWITLACGAKVFSLPVTRSSKRAPTAISRSHSCTAKFAALVPCIPSMPR

SEQ ID NO: 1066 - protein, 40 aa, Shigella flexneri
RFRIAGDIQNTWIRLHHFLGFTVQTAARWVDKNGFELIAL

SEQ ID NO: 1067 - protein, 112 aa, Shigella flexneri
FLQRFVADLPRGAQVVQFSTFRTQCRQTEATLKVLFLHGTFNVVTSIGATTQVTNDARTDLRKQLVIDILFGIRRQTLLHFLDRHNRHFCRCRSRNTFFFQLLRMVRDFNVL

SEQ ID NO: 1068 - protein, 29 aa, Shigella flexneri
QAALSTAASSSARRLSSIASLRSASVGAV

SEQ ID NO: 1069 - DNA, 1239 bp, Campylobacter jejuni
atgaaacagaacgatcaaaaagaaaatcgtagagactttctaaaaaatataggacttggtttatttggcattagtgtattgtcaaatttttcttttgagaattttttaggaagtaaggctttggcaaaagaattgcctgattttaaaatagaaggtaaaaaagatcttatctaccatggcgaaaaaccattaacagcagaaactgaaatttatgctcttgattctgattttactaaacctgaaaatttctttgttagaaataatggcttaccaccaagcctagaaacgataaaagaaagacttcataaaggttggactttagaaatcgatggagaaagcattatcaataaaaaatcttacaccatagaagatttaaaaaagaaatttaaaacctatacttatgccttaacagttgaatgcggtggaaatggtagatccgaagttatacctagcacaaaaggaactcaatggggttatggtgcagtagcttgcggtagatggacaggagtgcgtttaaaagatattttaaaagattgtggcatcaaaaatgatgcggtttatatcggatattatggcatagatacaaaattaaatggtgaagaaacttcacctattagtagaggagttcctatttctaaagctttacaagatgaaactctaatagcttgggcttatgaaggcaaagatattcctttagtcaatggctatccacttagacttgtttgtggtggttaccctgcaagtacaagcggtaaatggctttataaaatttcagtaagaaataaaattcatgatggtgaaaaaatggaaggttcttataaagttcctgtaaatccggtaaaaccaggagattttaactataaaggcgagatgaaaatcatagaatcaatgcctataagatctgtaattactaatatcaaaaatggttctgaaataaaagcaaataaaaaatttgaagttagaggtaaagcttgggctggagaacttgaagttagtgaagtttatgtaagcaatgattatggcgtaacatggactaaagcaaaggtagaaaaaccattaaatagattagcatggcaaaaatggagtgctcaaatatcaataccaacaaaaggatattatgaaatttgggcaagagctatcgatagtcaaggtaacagtcaacctatggttttagcacagtggaatccaggaggatatatcaataatgcatgccatagagttaatgtttatggagtttaa

SEQ ID NO: 1070 - DNA, 4491 bp, Campylobacter jejuni
atggatttagaaaatatcctagaaaataatcaaagcataggtttatatcacccaaagaacgaacacgatgcctgtggtatcgctgcagttgctaatatacgcggtattgcttcttataaggttatttgtgatgctttagaaattttgatgaatcttgaacaccgaggtggtacaggagctgaagaaaattcaggtgatggggcggggattttaatccaaattccacatgatttttttaaaactcaagaattgggttttgaacttcctaaaaagggtgattatgctgtagcacagatgtttttatcacccaatactgatgcaaaagaagaagcaaaagaaatatttttacaaggtttaaaggataaaaaacttgaatttttaggttttagagaagtgccttttaatcctagcgatataggtgcaagtgctttaaaagctatgccttattttttacaagcctttgtaaaaaaaccaagtaaaataagtgcaggacttgagtttgaaagagtgctttatagtacgcgtcgacttatagaaaaaagagctattaatgtgccaaaattttatttttcaagtttttcttcacgcaccatagtttataaaggaatgcttctttcaactcaattgagcgatttttatcttgattttaaagatgtcaatatgaaatcagccatcgctttggtgcattctcgcttttcgactaataccttcccaagttgggaaagagcccatccaaaccgttatatggtgcataatggagagattaataccatacgcggaaatgttgatagcataagagctagagaaggcttgatgcaaagtgagtattttgaaaatttagatgaaatttttcctatcatagctaagcttagcagtgattctgcaatgtttgataatactttagaatttttagctctaaatggtcgtactttagaagaagcttttatgatgatggtgccagaaccttggcataaaaatgaaaatatggaaagcaaaaagcgtgctttttatgaatatcattctttattgatggagccttgggatggacctgctgctatagtttttactgatggagtgattatgggggcgagtttggatagaaatggttttcgtccttcaaggtattatcttacaaaagatgatatgctcatactttcaagtgaaacaggggctttaaaacttgatgaaaaaaatatcaaagctaaaaaacgcttagaacctggaaaacttttactcgttgatacagcaagaggtagggttatagctgataatgaaatcaaagagcattatgctaatgctaagccttataaaaaatggcttaaaaatttagttgaacttgaaaaacaaaaaagcggagtttataaacatcagtttttaaaagaagatgaggttttaaaacttcaaaaagcttttggttggagttatgatgagcttaaaatgagcgtggctgctatggctcaaaatggtaaagaagctatagcagctatgggtgtagatactcctttggctatactttctaaaacttatcaacctttgtataattattttaaacaactttttgcacaagtaactaatcctcctcttgatgccataagagaagagattgttacttctacaaggatttatctaggaagcgaaggcaatttattaaaacccgatgaaaacaatgcaaaacgcgtaaaaatagccttgcctgtgataagcaatgaagaactttttgaagttaaggctttaaataaatttcaagttaaagaattttctatactttatgattattctaaaaaaactttagaaaaggctttagatgaactttgcgttaagatagaagatgaggttaaaaaaggtgtttctattatcattttaagcgataaaggagtggatgaaaaaaacgcttatatccctgctttgcttgctgtttctggagtgcataatcatctagtaagaaaaaatttaagaacacatacaagtcttatcatcgaaagtggtgaacctagagaaattcatcattttgcatgtcttttaggttatggtgcgactgttattaatccttatttggtttatgagagtatacaaaaactcattgccaataaagatttaaatttaagttatgaaaaggcggtagaaaatttcatcaaggcaagttcaagtggtatagtcaaaattgcttctaaaatgggggtttctaccttgcaaagttataatggctctgcactttttgaatgtctgggcttaagctctaaggtgattgataaatacttcacttctacaacttcacgcattgaaggtatggatttagaagattttgaaaaagaactcattgctttacacaaacatgcttttaacgatacacataaggctttagattctaaaggaattcatggttttagaagtgctaaagaagaacatttaatcgatccgcttgtgatttttaatcttcagcaagcctgtcgcaacaaagactataaaagctttaaaaaatactcggctttagtagatgaaaaacaagttaatttgcgttctttgatggaatttgattttagtgaagctatcagtatagataaggttgaaagtgtagaaagtatagttaaacgctttagaacaggggcgatgagttatggttctatttctaaagaagcacacgagtgtttagcacaggctatgaataaaataggtgctaaatcaaattcaggtgaaggtggtgaggatgaagaacgctatgaaatcaaagagggtgtggataaaaactcagccattaagcaagtagcaagtgggcgttttggcgtggatttaaactacttaagtcatgcaaaagaaattcaaatcaaagtcgctcaaggtgcaaaaccaggtgagggcggacaattaatgggctttaaagtctatccttggatagctaaggctagacattctactgcaggtgtgacgcttatttccccacctcctcatcatgatatttattctattgaggatttggctcaactcatttatgatttaaaacatgcgaacaaagacgctaaaatttcagtaaaacttgtaagcgaaaatggcataggaacggttgctgcaggtgtggctaaggcaggcgcgaatttaatccttgtttcaggttatgatggaggtacgggtgcaagtcctagaacttctataccgcatgctggaattccttgggagttaggcttagctgaaacgcatcaaactttgatcttaaataagcttagagatagggtaagattagaaactgatggaaagcttatgaatgggcgtgatttagccatagcagcacttttaggagctgaagaatttggttttgcaaccgctcctttgattgttttaggttgtacaatgatgagagtttgtcatctaaatacctgtccttttggtatagccactcaagatacagaacttagagatcgtttcaaaggcaaagtagatgatgtgattaatttcatgtattttatagctgaggagcttagagaatacatggcaaggcttggttttgaacgcctagatgatatgataggtcgcgtggataaactccgccaaaaaagtgtgcaaggtaaagcaggaaagctaaatttagataaaattttaaaatccttgcctacttataatagaaccgctgtgcattttaaagattataaagacaataaacttgaaaaaacgattgattatagaattttactaccactttgtaaaaatgctgtggagaaaaaagagcctatcaaactttctttagaagtaggaaatcaaagtcgtacttttgcaactatgctttcaagtgaaattttaaaaacttatggaaaagatgctttagatgaagatagtatccatatcaaagctataggcaatgcaggcaatagctttggagcgtttttgttaaagggtattaaacttgagattataggcgatagcaatgattatttaggcaagggtttaagtggtggtaaaatcatagcaaaaatttcaaatgaagccactttttcacctgaagaaaatatcatcgcaggaaatgcttgtttatacggagctacaaaaggtgaagtgtatttagatggtatagcaggggaaagattttgtgtaagaaattcaggggctttggctgtggttttaggaacaggcgtgcatggttgtgaatatatgacaggtggacaagttgtagttcttggagatgtgggtgcgaatttcgctgctggtatgagtgggggcgttgtttatatctttggaagacacaatgaagctcatgtaaataccgagcttgtggatattaaagatcttaatgctaaggatgaaaaagaattaaaagctgtgatagaaaaacatatcacttatacagattctaaaaaggctaaagatattttagaaaaattcgataaaaaagacttttttaaagtcatgccaagagattatgaaaagatgttaaaaatgcttgatctttgtaaaaatgaaaaagatccaaatttagcagcatttttgaaaatcacacaaaaataa

SEQ ID NO: 1071 - DNA, 996 bp, Campylobacter jejuni
atgaaaaaagctaaatcaaggattgctattttaggaacaggcggaacgatagcaggcttcattgatagcactattgctacaacaggatatgcggccggagccattgatatagatgtattaattaaagcagttccgcaaattagagatttagcagatattagttgggagcaaatagcaaatattgatagttcaaatatgtgtgatgaaatttggttaaggcttgctaaaaaaattgctaagctttttgctgaggggatagacggtgtggtgataactcatggtactgatactatggaagaaactgcttattttttaaatttaaccattaaaagtgataagcccgtagttctagttggcgctatgcgtccatcaactgctataagtgcggatggtccgaaaaatctttataatgcagtggcattagttgtcaataaagaagctaagaataagggtgttatggtagctataaatgataaaattttaagcgctagaggcgtagtaaaaactcatagtttaaatgttgatgctttctcttctcctgattttggggatttgggttatatagtagatggtaaagtctttttctataataatgttattaaagctcacacaaaaaacgctccttttgatgtaagcaaactcacaagtttgccaaaagtagatattctttatagctattcaaatgatggtagtggtgtcgctgcaaaagctttatttgaacatggaactaagggcatagttgttgcaggaagtggagcaggaagtatacacaaaaatcaaaaagatgttttaaaagagcttttaaaaaaagggcttaaggttgttgtaagttcaagggttgtagcaggttgtgttgctgtgagtgattcagatgaaaaattaggttttattagtgctgaagatttaaatcctcaaaaagcaagagttttgcttatgttagcacttacaaaaacaagtgatcctaaaaaaattcaagagtattttttaaaatattaa

SEQ ID NO: 1072 - DNA, 1044 bp, Campylobacter jejuni
atgaaaaaacacattttattgcttggcttatgtcttagtttgagtcttagtgctaaaagcgtgagtgattacaaagtaggagaagaattaagcgacaaggaaggagtagagtattttaaggaactttccaaaagacctgtgcaagaatggccaaataaaaatttaagcatcaatgatgttccaaaaggcaagcaaggggatttaatccgttatggcatagagcttttaagcaagacagaaagtactctaggaccctatagcaagctaaaaaagacaagcaacgaagtaaattgtatttcctgtcacatggacaatgacggcaatggtttgccagggacaaaaaaatatgttattccatttttaaatatcctaaacaattatccaagacttgacatagaaacgatgaaaatcatctctgttgaagatagaattcgcggaatgggcggaactgactctcatagatttcctaatgattctaaagaaatgaaagcaattttagcttattttaaatggctaaaagaagcttatggtatcaaagacggtgtaaaacttgaaggagatttttttgctaagatgaattttccaaatcgcccagctgaccctgtgcgtgggaaaaagctctttgaagaaaattgcgttgcttgtcatggcgaaagaggacttggggtaaaaaatgataattacgaacaaggtagcggacatttatatccatctttacttatctatcctgatggtggacacatggctatgataccatttttagcaagatttttaaaatcagccatgccttttggtgcgagtgcggataatcctatattaagcgatgaagatgcactagatatagcagcttatgtcaatacaggttttgtaagaatgcctataaccactacagaaaatcgtgcaggacttgatacagcttatagcaaatccccatcattaaaacctgagtattttgcctcaccgcaacaaaatttagaccctaaagaatacataaaagtaaaatacggaccttggaaaaatccaaatcacttcccaggagaatga

SEQ ID NO: 1073 - DNA, 807 bp, Campylobacter jejuni
atgcaaaaaattatagtttttattttatgttgttttatgactttttttctttatgcatgttcttctaaatttgaaaatgtaaatcctttggggcgttcatttggagaatttgaagatactgatcctttaaaactaggacttgaacctacttttcctaccaatcaagaaattccaagtttaattagcggtgctgatttagtacctattactcctattaccccacctttaactagaacaagcaatagtgccaacaataatgcagcaaatgggatcaatcctcgctttaaagacgaagcttttaatgatgttttaatttttgaaaatcgccctgcggtttctgattttttaaccattttaggccctagcggagcagctttaacggtttgggctttagcacaaggaaattggatttggggctatactttaatcgatagcaaaggatttggcgatgctagagtttggcaacttttgctttatcctaatgattttgcaatgattaaaaatgccaaaaccaatacttgtcttaatgcttatggtaatggaattgtccattatccttgtgatgcaagcaatcacgcacaaatgtggaaacttatccctatgagcaatacagcggttcaaattaaaaatttaggaaatggaaaatgcatacaagcacctattacaaatctttatggtgattttcacaaggtttttaaaatttttaccgtagagtgtgcaaaaaaagataattttgatcaacaatggtttttaactactccgccttttaccgcaaaacctttatatcgccaaggagaggtacgatga

SEQ ID NO: 1074 - DNA, 1203 bp, Campylobacter jejuni
atgaaaataattaaaattctttttttaggcttatttttaagcctaagtcttaatgctaaagttataaccacaacttcaacaaaatcaagcacaggtgaaggcacaggcttgactagggaagatgcgataaacaatgccattatagaagctataggaaaaatgagtggagtaagcatcaattctcttaagaaatctaacactagcgtttcaactgataattcaggttcaaatatacaagataattacagcgagcaaatttcaaaagccaccaaaggtagagctgatacttatgaaatcaatagtgttgaacaagatgcaaatggtaaatatacagccaatgtaacgatttttaaaaccacaacaacaaaaaagtatcaagctccaggtttaagtgcagataatagaagaagtattactgtttttgattctactccagatgctgcaaaaagaggtataggctcagctttgcaacaaaaaatcatttctgatttattgcaaagtcgtaaatttaatgttttagaccgtgattctagtggctattatgaaatggaaaaagctttaatcaaaagtggcgacgcagctagcgatgaagtttataaacttaaaaatatgttagcaacagattatattttattgttttctatttcaggacttgaaggtaaacaaaaaacaagcaatttaacaggaaaaagcaaaactgaaattgaagttatcgtagattatcgtgtgcttttatttgctacaagacaaattaaattttctaatactttaagcatgaaagtcaatcttaaagacaatagtcttagtgccaatgaaaccgcactcaaacaaattgcaaatcgtatagcaggagatattttaaacgcaatttatcctttgaaagttgcaagtgttgaaaacaatgaagtaatattttctcaaagcttaaatcaaggtgatgtttatgaatgttttgctcttgggaaggttataaaagatacttatacaaaagaaaatacaggaagagtagaaagcaaaacaggaagtattgaaatcactcgcacaagccctaaattttcttatgcaaaaatcacagaaggtagtgtaaaagtgggcgatatttgcagacctttaagtaatactggtagtggaaatggctacactataggtcgtgatgcaaattatcaaacccaagaaggcggcggagtaaatctaggcttttaa

SEQ ID NO: 1075 - DNA, 498 bp, Campylobacter jejuni
atgaaaaaaattctttttacttcaatcgcagctcttgcagttgttattagtggttgtagcacaaaaagcactagcgtaagcggtgatagtagtgttgattcaaatcgtggttcaggtggaagtgatggttgggatattgattcaaaaatttctcaacttaatgatactttaaataaagtatattttgattttgataaattcaacattcgtcctgatatgcaaaatgttgtaagcacaaatgctaatatttttaacactgaagtaagcggtgtaagtattactgttgaaggaaactgcgatgagtggggaaccgatgaatataaccaagctctaggtttaaaaagagcaaaagctgtaaaagaagctttaatcgctaaaggtgtaaatgctgatagaattgctgttaaaagctatggagaaacaaatcctgtgtgcactgaaaaaactaaagcttgcgatgcgcaaaatagacgtgctgaatttaaattatcaagataa

SEQ ID NO: 1076 - DNA, 879 bp, Campylobacter jejuni
ttgaaaattttagttccagctacgagtgcgaatttagggccaggttttgattgtttaggacttagtttaaagctttttaatgaaactcaaatccaaaaatcaggtgtttttagcattagtattggaggcgagggaagtgataatatttttcttaaaaaaaacaatatatttgtaaatattttttatgaaatttatgaaaaactaagcggaaaaaaagataattttcgttttatttttcaaaataacattcctctttcaagaggattaggaagctcttcagctgtgattgttggagctattgccagtgcttattatatgagtggatttaaggtagaaaaagaatgtattttagatgaagctttaatttatgaaaaccatccagataatatcgctccagctactcttggtggttttgtgtgttctttggttgaaaaaaataaagtttatagtatcaaaaaagagattgataaagatttagctgctgtggttgtgatcccaaatttggcaatgagcacggaacaatcacgccaagctttggccaaaaatttaagttttaatgatgcggttttcaacctttctcatgcttcatttttaaccgcttgttttttggagaaaaaatatgaatttttaaaatttgcaagtcaagataagctccatgaaatcaatcgtatgaaaaacttacccgagctttttgaagtgcaaaaatttgccttagaaaataaagctttaatgagcacactttcaggttcgggatcgagctttttttctttagcttttaaagatgacgctttagctttggcaaagaaaatacaaacaaaatttaaagattttcgtgtgcaatatttagaatttgatgataatggctttgaaatttgctaa

SEQ ID NO: 1077 - DNA, 891 bp, Campylobacter jejuni
ttgaaaaaaattatattatttatcttatctttagggatattttatactttcacacaagctaaaaatttagagcaagaacaaaatactagcagcaatttagttagtgtcagtatagcacctcaagcattttttgttaaaaaaatagctgcaaatactctagatgtcaatgttattttgcctccaaatagcaatgagcataattttgaatttaaaccaagtactatgaaaaaacttgaaaaaagtgatatttatttcaccataggcttagaatttgaaaaagtttttacggataaatttaaacaaaattttccaaaacttcaagttataaatatgcaaaaaaacatagctttgattcaaactcatgatacacacgaacactctcatgagcatgaacaccacgaacatgggcattttgatcctcatacttggctagatcctattttagtccaaactatggctttaaatatttatgacaccttaattcaaaaatatccacaaaatgaaaatttatataaagaaaatttagataaatttttagcagaattagatagtttaaatttacaaattgcctcaaaattagaaaaattaaaaaatagagaatttgtagtttatcatccttcttggacatattttgcaaaacgctataatcttacgcaaattcctgtagaaattttaggtaaggaaccaaaaagcaaagatttgcaaaaacttatcactctaatgaaagataaaaatttaaaagtcatttttgttcaaaatggtttccctgaaaatgcagcaaaaacacttgctaaagaatgtgatgcaaaaatttacaaaatagatcatttatcttatgattgggaaaatgagcttttaaaaactgctgatgccttttctcataatttataa

SEQ ID NO: 1078 - DNA, 426 bp, Campylobacter jejuni
atgcaaaaagctaaaattttaattgccttaagtttttttttattagttttatctgcctgttctaatgatgaaaaaaatatttccaagactcaaaatacagatcaagaagtagtccaaatagaacaaaacgatgaaaaaacagaattaagtgactccaacctgcctttacctgtagatgatgaagcacaaagttcaaatgatgaacatgaagtcaatcctagtattatcaactctttatataaacaaaaatgcgccacttgtcatggagaaaaaggggaattaaaacctaaaaacagcacggccattaaaaccttgagcaataaaatttttatacaaaaaataaaaacgataaaagataaaaaccatagttttttaagtgatgaacaaattcaaaatttagctgattttataaacaaaggaaaataa

SEQ ID NO: 1079 - DNA, 2268 bp, Campylobacter jejuni
atgaaaaaattaagtttattttgtgctgtaggtttatgttttgctagttttgctttttctgaagaattagaatttgatagtcttgaaatttcaggttcaaaaatcaaaaacgatgaaaaaccttttgtaactcctggggcaacaagcacaagagagggtataggttcagatacacaaagtatagattctatagtgcgtagtatacctggaacctacacaaacacagatcaagctcaaggcacagttcaagtaaatattcgtggtatgagtggttttgggcgtgttaataccatgattgacggtgttactcaaactttttatggtagtgcatcagatgatccagctagatttcattcacaaacgggaacttcagcttttggagctgttattgatacaaatttcttaatcggagttgatgttacaaggggaacttttgaaggagtaggtggagcaaatgccttgatgggatcagcaaattttaagaccataggtataaatgatattgtacatgatggcaatatctttggatttttaggacgattttcttatggaagcaatggaatcggaccaagttatatgagtgcagtggctggaaagactgaacttgaaaataatggatatgtgggcgcgctttttggttatagcgcaaagagaattactcaaaattacactgtaggcgggggtggcaagataggtagtagtatggttgatactgatggagatggtatagctgataccaatatcgctccttttgatccagattttttaacccaaaaaccaaactctcaactttttaaactcgaatatgtcccaaattcttttacaaacactatattttcttatcgtagatatcaaaacgaacttgccggtagaaaaatacacaatgacaattatcaacttgatttttggcacaaccctaatgagtggcttaatgtaaatacgcttattgcctacaatcaaggcatacaaacctatggatcaaaatctacttttgcggcaaacgatgccatagctaacacaaaggcaaaaaatactgccactacttttgatataagtgatactttagagggtgaatggcatagatttaatctaaacatacgctttggagcaaatattttgcttaatgattataaaaataccttaaatacatcaattcaaggagtaaattctataccttttcagcctcgtggaaaacaaaatctttttacttattatcttgataatagtctaaattatggtatctttacacttgataccaatgtgaatcttttagattggaatatcaaaggacacagacctgcttgcgatgaagtaaattttatgtgttttccaaaagcggcgacagatatagataaaaatggacttcgcctgaatgcttctgtcatgctttcagctgccatacacgagcttattacaccctttgtaagttttgcgagaacaaatagagcccctaatgtgcaagaaatgtttttctcaaataacgaaggcaatggtatcaattctttcttaaaaccagaacaagccaatacttggcaaataggttttaattcttttaaacatggacttttaaaagatgatgatcgctttggttttaaagccgtgtattatcatacaaaaataaaagattatatttataatgaacaattttatcttgaagatccaagtaaagatcctccaagctcgcaattttatatgcacttaaattcagctgatgataccatatttaagggtgtggagttagaattaagctatgacttgggttttgcttatgctaaagctatgtattcaagacaagatacaagttcgactatttctcaaacttcaggacctcttcttggctctttttcggcaagtaaaatcatggagcttccaaaagattatgcaaatgtagagcttggctttaggttaaatgataaaataagctttggtggtatagcaaaatacacaggcaaagcaaaaagggtaaatccaaatacagatgattggaataaggatccaaacaatccttattatcctaaaccaaccacacaagacttaccaaaaattcctattatagtagatttatattggaatatagaatggtttaaaaacctcacaatgagagcagaggtgcaaaatttatttgataaaaactacatggatgccttaaatgcttataattccttagataatcagcttcaatataatggagcaggtgatcctatctatctttttagcaattctgctcgcggtcgtacttttatagtaagttttgaatataaatattaa

SEQ ID NO: 1080 - DNA, 747 bp, Campylobacter jejuni
atgaagtctagtgtgatttttgggtttgtgttaagtttgatattgcatactttagtattaatgtttttccttttttctttttatactcaagaaaaatcaagtggtgttgattttaaacaaggagcggaatttacttccattatgatggtatcagagtttcctatcggggaattaaaagaagtttcgattgatcaaaaaaagagtaattctcaagataaaaacaaaaaacaagacgaaagaataagttttaattctcaagataaaaatgctgtattaaaagttcaaaaaaagattgaaaagcaagatgaaaaccaagctcaaaaagaaatagctaatgcaagtgaaaattcaaaatttaaaaatgaatcgctcagtgctccgctacaaagtaataaagataaaacacaaactatagtaagtggcaatgccaaagaacaagttaaaagctatcaagctttgcttatggctcatttgactaaatttaaaaaatatcctcaagaagcgataatgcaaaaacaagaaggcgttgtaagaattcgcgtaagcattgatgaaagcggaaatgtcttaagcaaagagcttaaaaaatcttgcccttatgcagcgctcaatgatgaagctttaagtttatttaaaagagcttctccattgccaaaaccgcctaaagaaatgttaaaaaatggtgataaaatcagttttgttatgcctattgattacaatattaaagactatttaggtaaaaaataa

SEQ ID NO: 1081 - DNA, 2517 bp, Campylobacter jejuni
atgctagatagaagaaaatttttaaaaattggagcgagcttaagtgctttacctctcattccaagcttaagtgcaggaaaaaccgtagaagcttcaaaagttagcctcggacttgtaaaaaatggagaagtgatcaccgcagcacactgggggattttaaaacttactataaaagatggcaaaatagtaaaaagtgaaccttgggaaaaagttacaaaaatggataatcctttacagcactataccgccgatatggtttataaatctcgtgtgaagtacccttatgtgcgtaaatcctaccttgaaaatcctgacaatcctaaacctgaacttcgcggaaaagatgagtttgttcgcgtaagttatgatgaagcgatcaaactcatcgccaaagaacttaaaaaaacaagagatagtaaaggcgcaagtgcgatttttggtggaagttatggctggaaatcaagtggaaatatgcaaaactcacgtatcttgcttcatagatttttaaatgtaacaggtggatttgtaggagctacaggggactattctacaggagcttctcaagtgattatgccttatgttgtaggatcgattgaagtttatgagcaacaaacctcatgggaaaatatcttaagtgattctaaatatgttgtgatttggggtgctgatccactttctactttacgtatagcttggacttcaaacgaacaaagaggtttggcatattttgaaaaacttaaagacagtaaaatcaaagtaatttgtatagatcctgtaaaaaccactacagcaaaatttttaaatgccaaatggatagctccacgcccaaataccgatgtagctttaatgatgggcatggcaagccatttaatcgctaagaaaaaagtcaattacgagtttttagacacttacactacaggctttgataaatttaaagactatttagaaggcaaagaagatggagttaaaaaagataccaaatgggcaagtaaaatttgcggtatcgatgaaaaaactatcaaaaatttagctgaaactttttatgataattctactatgattatgagtggttggggtatgcaaagagcacatcatggcgaacagcctcactggatgttagttactctttgtgcgatgttaggacaaatcggcacaaaaggaggtggttttggactaagctaccattacagcaatggtggtgttccaacttgcaaaggcggagtgatcggcggtatgacagcaggtagcttagggatttggaaaaatggtaaatttaaaggcttaagcaaagcagaagcttcaagcgaaggtgcagaatggcttcaaaatgcagcgagttattctttccctgtagcaagaatcgctgatgctttacttcatcctggaaaaaccatagatcataatggtgctaaaatcacttatcctgatattgattttatctactgggtaggtggaaatcctttagtgcatcatcaaaataccaacactaatgtaaaagcatggagaaaaccacgcaccgttgtggtaaatgaaatttactggactccaacagctaaaatggcagatattgttatgcctgtaacttcatcttatgaaagagatgatattaccatgacaggagattattcaaatatgcatatagctcctatgaaacaagcagttgagcctgtgggtgagagcaaagatgattatgtaattttctctgatatttgcaaaatttatggaaaagatgtctttaatgcctacacagaaaatggcaaaaaagctaaagatttcatcaaagaatactacaatagcgccctaaaacaaactcaaagttttggtgaagcttttgctactcctatgccaagttttgaagaattttgggctaaaaatgaaccaatcacttttgaaccaacagctgaaagtttagaatggactcgtttttcagaatttatagaagatcctatcttaaatgctctgggtacagattcaggactcattgaaatttactcagaaacgattaaaaattataattatgatgattgcaaagcccaccctacttggtttgagcctattgaatggcttggaaatgcaagcaaagaagcacctttccacttacttacaaatcacccaagagatcgcttgcactctcaactttgccacacaagcttaagagatacttatgcaataaaagatagagagccaattttaatcaattctaaagatgcaaaaaaacttggtataaaaaatggcgatgtagtgcgtgtgtttaataaacgcggtgaagttttagcaggggcagttgtaagtgatgaaatcatgcaaggggttgtaagactttgcgaaggtgcttggtatgatcctaatgaaaacggactttgcaaatgtggaaatgcaaatgttttaaccatggatataccaacttcaaaacttgccaatggcaatatctctcacacagggctcgtaaacatagaaaaatttaaaggtgaattaccaaaacttactgcctttagcgccccaaaaggtgcgaactaa

SEQ ID NO: 1082 - DNA, 978 bp, Campylobacter jejuni
atgaaaaatttttctctttggtgtgattttatagaaaatagttttttagataatgaatttttaaatttattatcacatggaattaatggcgctacttcaaatcctgctatttttaaaaatgctattttaaattctccaatttataaagataaaattcttaaattaaaagaaaaaaaaacaaaagatatttatgaagaattagcaatttctgatattcaaaaagcagctgataaattagctcctcttttttatcaaaaaaatgatggatttataagtattgaaatagatccaagacttcatgataacacaactcttagtttaggtgaagctaaaagactttatagtgctattggcaaagaaaatataatgattaaaattccagctacaaaagcttcttatgaagtaatgtatgaacttatgaaaaatggtattagcgtcaatgctaccttaattttttctcttgaacaaagtcaaaaatgttttgaagctttaaatgcaggtttagtcgaatttagaaaaaacaatatagccttaaaagaacaaaacactagaacaccacaagctgttataagtatttttgtaagtcgttttgatagacttttaaatcctaaggctaaggagcaaaatcgtattggaattttaaatgcaaatttagcttataacaatatctactcaaaaaatgaacctaatattcgtgccttgtttgcaagcaccggagttaaaggagatgatctgccaaaagactattatatcaaagaacttctttttgagaattctgttaatactgctcctcttgatgcaatagaggcatttaaaggaaaaatgcattttaaaaaacctttaatgaattttgaaatttatacagaacttaatcaaatcatttctcaaagtgaacgagaaaaagcttgcaatgatttattaagtgatggcctagagcaattttgtattgcttttgaagatattttaaaagctctttaa

SEQ ID NO: 1083 - DNA, 957 bp, Campylobacter jejuni
atgtttgatgaaaatatcgtgaaaacgggttcaaatgaaatggagcttgtcgatttccgtatctttaagcaagggcacgataaagtctatgaaggaatttatggtgtaaatgtttctaaggtaagggagattataaaaatcccaagccttacagaacttccaggtgtacctgattacatcgaaggaatctttgatcttcgtggagtggttatacctgtagtcaatcttgccaaatggatgcaaatcactgagccagaaagcactatgctaaaacctagagttattattactgaatttagcaatattcttattggttttatagttcacgaagcaaaaagaattcgtagaataaactggaaagatatagaaccagcaactttttctacaggatcaggtgctttagataaaggtaaaattacaggtgtaacacgcattgaaaatgatgaagtgttgctaattttagatcttgaaagtgttgttgaagatttaggaatttacgctccaaaaacagatatagattttggaaaaatagaaaaatttactggaacagcacttatacttgatgacagcatgactgctagaaaacgcgtcaaagaaatgatgcaacagatgggctttcaagttgttgaagctaaggacggcgtagagggcataaacaaattagaagaattaagccaaatttatggtgaaagtttaaacgatactttaaaaattatagtaagcgatgtcgaaatgccacaaatggatggtttccactttgctgcacgcattaaagaagatccaagatttaaagatattcctatagtctttaactcatctttatcaaatgaatttatgaatgagaaaggtgttcaagaagctggtggagaaggctatcttgtcaaatttaacgctagcgatttcttcaatgaaattgcaaaggttattaaaaaacatcaatctcaagaacaggggtaa

SEQ ID NO: 1084 - DNA, 849 bp, Campylobacter jejuni
atgcaagtcattacttctgtcaaagaagcaaaacaaattgtaaaagattggaaatcacatcaacttagtataggctatgttccaaccatgggttttttacacgatggacatttaagtttagtcaaacatgccaaaacacaagataaggttatagtaagtatctttgtaaatcctatgcaatttgggcctaatgaagatttttctagttatccaagagatttagaacgcgacattaaaatgtgtcaagataatggcgttgatatggtttttatccccgatgcaactcaaatgtatcttaagaattttagcacctatgtagatatgaatacgatcactgataaactttgcggggctaaaagaccggggcattttagaggcgtttgcacggttttaactaaattttttaatatcctaaaccctgatatagtctatatggggcaaaaagacgcgcagcaatgcgtagtcgttaggcatatggttgatgatttaaattttgatttaaaaattcaaatttgtcctatcattagagaagaagatggcttagctaaaagctctagaaatgtatatcttagcaaagaagaaagaaaagcgtcactagctatatctcaaagcatttttttggctgaaaaattagtccgagagggagaaaaaaatacttctaagatcatccaagctatgaaagatattttagaaaaagaaaaactaatcaaaatcgattatatagaattagtcgattttaacaccatggaaaatatcgaaaatatcactgataatgttttaggagcggtggctgcttttgttggaaaaacaagactcattgataattttttagtacaaggattaaaatga

SEQ ID NO: 1085 - DNA, 999 bp, Campylobacter jejuni
atgaaaaaaatatttttaacactattttgtttaatatttctatgtgcttgtggcaccaaaagacaatattttgaaccaaaacaaaccgatggagatttaagtcataatagcaatttaaaaagtaaaatcgttgattggaatctagtttctgcaaaacttagcaataatacaactatcttaaaaaataatatctccatagacaagtttaaacttcctaaaaattatatgcttctagcttatcaagatggggaatattttactgcagataataatggaaatttaaaaatttttgacaattcttataatgaaatttataattttcaatttgacgctagtgttgtaggagtagcttctaatggagatgatttagcccttgtacttgcaaacaatactatagttcttgcaaatcgttctttgggtattaaattcagtcaaaccctaacctcagctccagcccaagacagtcgtaccgctaatcctatatttttagacaatatcatcgtttatccaacactagatggtaaaattttaattctttcaagaaacaatcttcaaatcattaaagatgtggttatttcagcagaaaattttttcaacaatgtaatccatctaagtgtaatcggagataaacttatagcagcaacagctaaaaaaatcattgttgtaagccctgctagaactctttatcttgacgctgacataaaagatgttgcacttagcgatgatggtatttttatactagaaaaagatggcactattattaaaactgattataacttaagaaaaattgcggaaaaaaaatttgaatttgctatttttgtaaaaagcaatatatacaataattatttatatatttttgaaaaaacaggctatcttatcaaaatgaatctgaatttagataatgcacaagtatttaaactttcagaagctgttgataaaatttctttcatgggaaatggtaaattttactacggagataaaattttagatttgctatga

SEQ ID NO: 1086 - DNA, 900 bp, Campylobacter jejuni
atgaaaaaatatattttacttgctagtagtatgttaattttagcagcttgtgggggtacaagtagtaattttgtcaatgtttctatgccaaattttaaaccccaagttccaacaaaggttgaacctattgattctggagtaagcattgctcttgtgcctattaatatagaacaaaataacaattattctgattattttgaaaattcagtgcttaaaattcgcatagaaaaagaaattgatcttttaaaacaaaatttagaagagcagatcaaaaccatcgctcaactaaaaggctataaaatagttactactaatccagactacactcttaaaagttcaatcagtatttatacggaagaaaaaaatgtacaaaaaacaagcaattttatgagtggagattatgtaaaatccaatttaggtataaattttaaaggtaaaatagattttatagatgcacacaatccacaaaattcaaccaatctttcaagtagcactaaactagattctttagttgcgcttaactatcctattaaaaatgatgatggggttaatatgtttaaaactactatctctaccgtaccaactcaactcaataaaggtttagagcaacctgcttttgaaattgataaaagttttttagctttttataaaaatacattaaatacactttataacaatctaccaaaagcaacagacataggcaaaactatacctaatacaaacagtggttttaatagttttgatggcgatgctacctttgaagaaagcttacctcaaacaaattctaatcaaaataatacaattgaaaacgcgcctacacaaaatattcctacaaatccatcttcaacaaatcaaaataatcaaagtaaaaatcaagatggggtagaaatatttgaatga

SEQ ID NO: 1087 - DNA, 1722 bp, Campylobacter jejuni
atggctgaagtattaaaaaaagtagatgtagtaacagttggagcaggatggactggaggtatagtggctgcagagcttactaaagcaggtttgaatgtacttagtttagaacgcggacatatgcaaagtactgaaaattttaattatatccatgatgagtggagatatgggattaattatggtttgatgcaagattgctcaaaagacactgtgacttttcgccatgatcctagtggtttagccttaccttatcgtaaaatgggttcgtttttattgggtaataatgttggcggtgcaggggtgcattggaatggttggacttttaggtttatgccttatgactttgaaattcaaaccctaagcaaacaaagatatggtaataaattaggtaatgattataccttgcaagattggggcgtgacttataaggatatggagccttattatgatagatttgaaaaaacctgtggggtatcaggtgaaccaaatcctttagcggaaaaaatgggagcttttagatccagtccttatccacaagaacctcttgaaaatactaaaatgcttaaacgatttgaaagtgcagcaaaaagttcaaatttacacacttatcgtttgccagcttcaaattctaaaggtggctatacaaaccctgatggtcaagatttagctccttgtcaatactgtgcgtattgtgagcgttttggttgtgagtatggtgcaaaagcaagtcctttaaacacagtaattccaaaggctatgagcacaggtaaatacaccatacgcacttatagtaatgtaacgcaaattcttaaaaaagacggaaaagtaacgggggtaaaatttgtcgatactagaacgatgaaagagtatatccagcctgctgatatagttgtacttacaagttatatgtttaacaatgctaagcttttaatggtaagcaacataggtgagcaatacgatccaaaaacaggtaaaggaactttaggtagaaattattgttaccaaatgaacatgggcacaacagctttctttgatgagcaatttaacacctttatgggttcaggtgctttaggaactacgagtgatgattttaacggagataattttgatcattctaaggaaaaattccttcatggagctatgatttatagcgttcagcttggaactcgccctatacaatcagccccacttccagcaggagctccaacttggggtgccgaatttaaaaaagcattaaactataatttcacaagagctattaccgtaggagggcaaggtgcttctttgcctcataagaataattatttaagtcttgatccaacttataaagatgcttttggtatgccacttttacgcttaacttataatttcactgatcaagatagagctttgcataaatttatcacagataaaacagctgaggtagcaaaaagaatgcaaggagtaaaatcaatcaaaaaaggtgcttatcttaaggattatagcgttgtgccttatcaatctactcataacacaggtggaacaaccatgggcgcagatagagaaactagtgtggttaatacttatttacaacactgggatgcggataatctttttgttgtaggagcaggaaatttccaacataatagtggatataatccaactgatactgtgggagctttggcttatcgctgtgctgaaggtattttaaaatatcataaaagtggaaaaagcttagcttga

SEQ ID NO: 1088 - DNA, 1209 bp, Campylobacter jejuni
atgaaaatttcactttttggatacggaaaaaccacacgtgctattgctgaaaatttagtagataaatttggaccttttgatatttatgatgatcattttacagaaacaaaaaaagatacactaggaaatttacttttaaatcctaatgattttgatgataatttaagcgatattgaaattcctagtccaggttttccaccaaagcacaaactcattcaaaaagcaaaaaatttacaaagcgaatatgactttttttatgatatcatgccaaaatccgtttggataagcggaaccaatggcaaaaccaccaccacacaaatggctacacatttattatcacacattggtgctgttatgggtggaaatgttggaactcctttagcagagcttaatccttatgcaaaactttggatacttgaaacttcatcttttaccctacactacactcataaagctaaacctgaaatttatgcacttttacctataagtcctgatcatctttcttggcatggaagttttgataattatgttcaagataagctaagcgttttaaaaagaatgaatgaatgtgatgtagtaatactgcctaaaatttatgcaaatactccaacaaaagctcataaaataagctatgaagatgaaaaagatctagctgttaaatttggcattgatacggaaaaaatttcctttaaaagtccttttttactcgatgctatcatggctttagctatagaaaaaattttacttgatactttaagctataagcttttaaatagctttgtaatggaaaaaaataaactcgaagagcttaaagacagtcaaaataggctttgggtaaatgacactaaagctacaaatgaaagtgctgtaatggctgcacttagtcgctataaagataaaaaaatccatcttatcatagggggagatgataagggtgtagatcttagcaatttatttgattttatgaaaggatttgatatagaactctatgctataggtattagtaccgaaaaaatgcttgattatgcaaaaaaagcgaatttgaaagcctataaatgcgaagttttatctaaagctgtaaatgaaatttcaaatcacttaagagtcaatgaagtagctcttttaagtcccgcttgtgcaagtttagatcagttcaactcttacgcagagcgtggaaaagtctttaaagaatgtgtgaataaaatttaa

SEQ ID NO: 1089 - DNA, 1098 bp, Campylobacter jejuni
atgtttggaagtaaaataaaccattctgatcttcaaaaacttgaagaagaaaataaaaatcttacacataaaattgaaaaatttcaatcggaaaatttagaattaaaaaataaaattacatcattagaacaagcggctttagagtctaaacttaaaacagatcttttaaatgttttattaactggggttttaaaaaatattactattattcaaggcgatatgttagaaaatgtaaataaggcagaagttatctctagctattctaaaacttctcttgctgaaatggatgaacttaaccatattgctaattctatcaatgcctctttgggaaatattacagaatcagccaataaaacaagagatgttgcaggaacattgcatagaagtgtagatgaaattactaatgtaattaatctaattaaagatgtttccgatcaaaccaatcttttagctcttaacgctgccatagaagctgcacgcgcaggtgaacatgggcgtggttttgctgttgttgccgatgaagtaagaaaactagctgaaaaaacacaaaaagcaaccacagaagttgaaatgaacatcaaccttctaaagcaaaatgcaaatgaaatgtatactcaaagtgagcaagttgaaaaaatttctatagattctaatgctcatattatgagtttttccgaaaaatttactcacttagtaaatgaagcgcattctactaattcaaatgcagttggtatcgcttcagaagctttcgtatctttagcaaaactagatcatatagcttttaaattaaatggttataaagaaattttttccaaatcaggaaagcaattagccgatcatacatcttgtcgcttaggaaaatggcttgctagcacaggaaaagaaagatttgggcaaaataaaagcttcttaaaaattaacgagccacatgaaaaagttcatgaaaatatgaataatgctataacaatagcaaatacagaagatattagcaaagatattactcaacacagcataattaataaatgcgaagttgctgaaaatgcatcgcttgatcttttcaatgtatttaaagaaatgcttgatgagtcagatcattaa

SEQ ID NO: 1090 - DNA, 1074 bp, Campylobacter jejuni
atgaattttatcaatcttcaagcccaatatctcgcatacaaagatgaaatcaatgctgaaattgaaagcgttttatcaagctcttctttcataggcggtgcaaagcttaacgaatttgagcaaaatttagctcatttcttaggtgttaaacacgctataggttgctcaagtggaactagtgctttataccttgccttaagagtcttagatattggtaaagatgatgaagttatagtgcctagttttactttcatagcaacagctgaagttgtggccttggtaggtgcaaaacctgtttttgcagatataaatttatcaaattacaatcttgattttaaagcagtgcaaaaagcaataacttcaaaaactaaagctgttatagcagtgagtatgtttggacaaatgagtgatttaagggctttagaagaaattttaaaagataaaaatatcactttgatcgaagatggtgcacaaagttttggcgcaagtttcaaaggagaaaaatcctgctctatagctaaaatttcatgcacaagcttttttccttcgaagcctttgggagcttatggcgatggcggggctattttttgccatgatgatgaaattgctaaaaaaataagaattttactcaatcacggacaaactcagcgttataaacatgaatttataggtataaatggacgccttgacaccttacaagcagcgattttaaatgttaagttaaaatacctagaaaaagaattagacaaaagacaaaaattagcacaaatttataatgcaaatttaaaaaactgtcaaattccacaaattaatccaaatgcttttagcgcttatgcacaatacagtgttttagttgaagatagagctagtgtattgcgaaaatttgaaaaagctaatataccttatgctatacactatccaacccctttgcataaacaaccttgctttagtgagttttcaaatttagaacttaaaaattcagaatacgcaagcgaacacatcttatctttgcctttttcaccttttttaagtgaagaagagcaagagcaagttatttgtatttttaaagattaa

SEQ ID NO: 1091 - DNA, 1710 bp, Campylobacter jejuni
atgatgagatttactaaattttatgcaccaagtttaaaagaagcgccaaaagatgcgagtttacctagtcatatttttttaacgcgtgcgggttttgtagaacaaattggtagcggactttataatttcttgcctttgggaaaaagagttttagacaagattaaaaatatagttaaagaagaaatggataaggctggagcacaagaagtaaatcttagttttatcactcctgcaagtttgtggcaagaaagtgggcgttacaatgtttttggaaaagaacttttgcgttttaaagacagaaaagaaaatgaatttgttttaggtccaacacatgaagaagctatgctttctttggtaaaaaacaaaatcacaagctataaacaacttcctttgcatttatatcaaattggacttaaatttcgtgatgaagcaaggcctagatttgggcttttaagatgtcgtgaatttctaatgaaagatggatatagttttcatgctaatgaagaagatttagggcgtgagtttgagcttatgtataaaacttattctcaaattttacaaagaatggggcttgattttagagcagttgaagctgatagtggggctattggtggaagtggctctaaggaatttatggttttagcaaaaaatggggaagatgatattttaatttgtgaaaattgtgattatgcggctaatgttgaagctgcaaaaagagctaaaaaaacttgtcaagatgagcgtcctgaagcaaattatgcaagtaaatttcacactccaaatattaaaactatagattctttagcacaattttttaaaatcaatgctttttatacgattaaagcagtggtaaaaaaagctatttatgaaaatgaaagcaaattagttgtgttttttataagaggaagtgatgatttgcaagaggttaaggctcaaaatacttgcagtgcccttgaactagtcgatgcgagcgaagaagaattgaaaaaagctggcttagtagctggttttataggttttgtgggattaaaagatatagatttttatatagattttgagcttgaaaacgaaaagcaaatgattatgggtgcgaatgaaaaagattatcatttaatcggtattgatgttgtaaatttaaataaagatcgttttaaagatttgattgaagttaaagaaggggattgctgtgttaaatgtggagcaaaattaaaacaaagtaaaggtatagaagtagggcatatttttaagctaggacaaaaatattccaaagcgatgaatgcaaatttcttagatgaaaatggcaaaagccagcctttttatatgggatgttacggcataggtgtttcacgcttgttggctgtagctattgaagcaaatcatgatgaaaaaggatgtatttggaataaaactttagctccttttgtgcttgaaattattgtttcaaatctcaaagatgaaaaggctttagaatttgctaataagctttatagggatttaactaatcttggattagaagtattgcttgatgatagaaatgagcgttttggggttaaaatgaatgattttgaacttatgggctttccttatgcgttagttattggtaaaggattagaaaataatgaaatagagcttatccaaagagaaggtttggtaaaagaacttataaaaactgatgaacttatggaaattcttaaaaagaaagtgttatga

SEQ ID NO: 1092 - DNA, 1929 bp, Campylobacter jejuni
atggcatttggtagtctatctagtttaggatttggttctggggttttaactcaagatactatagataaattaaaagaagcagagcaaaaagctcgtattgatccttatactaaaaaaattgaagaaaatacaaccaaacaaaaagatttaacagaaatcaaaactaaattactaagttttcagacggctgtttcatcattagccgatgctacggtttttgcgaaaagaaaagttgtaggaagtattagcgataatcctccagcaagtcttacggttaattcgggtgttgctttacaaagcatgaatatcaatgttactcaacttgcacaaaaagatgtgtatcaaagtaaaggattagcaaatgacggtggttttgttaatgcacaattaaatggaactgccgatcttacttttttttcaaatggcaaagaatatactgttacggtagataaaaacacaacctatagagatttagctgataaaattaatgaagctagtggaggagagattgttgctaagattgtaaacacaggagagaaaggcactccttaccgcttaactttaaccagcaaagaaacaggcgaagacagtgcgataagtttctatgcgggaaaaaaagattcgaatggtaaatatcaaaaagatataaatgcagaaaaaatattcgacgatcttggatggggattagatgtatcggcttctattgatccagataaggataaaaaaggttatggcattaaggatgcttctttgcatatccaaactgcgcaaaatgcagaatttacacttgatggtattaagatgtttagatcaagtaatactgttaccgatcttggtgtaggaatgactttaactttaaataaaacaggtgaaattaattttgatgtacagcaagattttgaaggtgtgacaaaagccatgcaagatttggtggatgcttataatgatttagtaaccaatcttaatgctgcaactgactataatagtgaaactggaacaaaaggaactttacaaggcatcagtgaagtaaattcaatacgctcaagcattcttgctgatttgtttgattctcaagttgttgatggaactactgaagatgcaaatggtaataaagtaaacactaaggttatgctttctatgcaggattttggcttaagtttaaatgatgcaggcactttgagttttgattcttctaaatttgaacaaaaagttaaagaagatccagactctactgaaagttttttttcaaatattactaaatacgaagacattaatcacacaggagaggtaattaagacaggaagtttaagtaaatatcttaattccaatggaggtaatactaatggtttagaatttaaaccaggagattttactatagtttttaataatcaaacatatgatttgtctaaaaattctgatggtactaattttaaattaacagggaaaacagaggaagaattgcttcaaaatttagctaatcatataaacagtaaaggtattgaaggcttaaaagttaaggttgaatcctataatcaaaacaatgttacagggtttaggttgaattttagtggagatggtagctcggatttttcaatcaaaggagatgctaacattctcaaggaattaggtttgtctgacgtaaatataacctctaagcctatagaaggtaaaggtattttttcaaaattaaaagccacgttgcaagagatgactggaaaagatggttcaattacaaaatatgatgagagtttgacaaatgatattaaatcattaaatacctctaaagactcgactcaggctatgattgatacaagatatgatacaatggcgaatcaatggttgcaatatgagagtattttaaataaactcaatcaacagctaaatactgtgactaatatgattaatgcggcaaacaattctaataattaa

SEQ ID NO: 1093 - DNA, 822 bp, Campylobacter jejuni
atgaaaaaattttctttagtcgcagcaactttgattgcaggtgtagttttaaatgtaaatgcagctacagtagctactgttaatggcaagagcattagcgatacagaagtaagtgaattttttgcccctatgcttagaggacaggattttaaaactttgccagataatcaaaaaaaagctcttattcagcaatatattatgcaagatttaattttgcaagatgctaaaaaacaaaatttagaaaaagaccctttatacacaaaagaacttgatcgtgcaaaagatgcaatacttgttaatgtttatcaagagaaaattttaaatactattaaaattgatgcggctaaagttaaagctttttatgatcaaaataaagacaaatatgtaaaacctgcaagagtgcaagcaaaacatatcttagtagcgacagaaaaagaagctaaggatattattaacgaacttaaaggtttaaaaggtaaagaactagatgctaaatttagcgagcttgctaaagagaaatcaattgatccaggttcaaaaaaccaaggtggtgagcttggttggtttgatcaatcaactatggtaaagccttttacagatgctgctttcgcgcttaaaaatggtactattactacaactccggtaaaaacgaattttggttatcatgtaatcttaaaagaaaattcgcaagctaaaggtcaaatcaaatttgatgaagtaaaacaaggtattgaaaacggacttaaatttgaagaatttaaaaaagttatcaatcaaaaaggccaagatctcttaaatagtgctaaagtggaatataaataa

SEQ ID NO: 1094 - DNA, 954 bp, Campylobacter jejuni
atgaaaaatgagtcaaaagaagatagcaatttttggatagcttatgctgatttaatggcaggattgctgtttgtttttattttgctaataggtgctattgttgtaaaatatgttttaactcaaagtgatttaaaagaaatcaaagataatctcaataaacaagaggcacgcttagaggagagtaaagaagagcttagaaataaagaagccatagtgtttaaactaagttctgatttaaacaatgcttctagtgctttaaatcttgctaattctcaaaaagcagaattagaggctaatattacaaattacaagcagttaagtaaagatttaaactcaactttagataataaagataagcaaattttgattttactaggtcaactagagaaaaaagatgaagagcttaaaaatttacaagaagattttcaaaaagctaaagaaaaggtgcaaaatcttggtttgattcgtgaaaatttaagcaaggaattacaaagtaagcttgataataatatcactatagatgaaaagataggatctatttctttgcctgctgaagtactttttgataaagattcttatgtgttaaaaaatgaggcaaaggcaagtttgagaaaaatcttaagcgaatattttgatgctattcttgaagatccaaaaattttttctaacattgaaaatatcattattgaaggacatactgatagtgatggatcttatatttataatttagatttgtcgcaaaaaagagcttatgaggtgatgaattttatctatactttttataagagtgataagcttcaaaagcttttaatggcaagtggacgttctttttcagatcctgtgtttgtcaacggagttgaagataaggataagagtcgtcgcatagaaataaaatttagcattaaaaatgataatgctttaaaggatgtagaaaaattctttgaatttcattaa

SEQ ID NO: 1095 - DNA, 996 bp, Campylobacter jejuni
atgaaaaaaattctatctttaagtgtgacaagtcttgcactttgtggtgctttaaatgcagtagatttaaaaatcgcaggttcatcgactgtgtatccttttacttcttttgtagctgaagaatatgcttcgatcaaaaatacaaaaactcctatagtagagagcttgggaacagggggtggatttaaggtattttgtgaaggaactactgatatttctaatgcttcaagacctatgaaattaagcgaatttgaaacttgcaaaaaagcaggggtaactgatatagtagggatgatgataggttatgatggtatagttttagctcaaaataaaaccaatgctccattaaatatcacaaaaaaagaacttttcttagcattagcaaaagaaattccacaaaatggaaaacttataccaaatccttatacaaactggaatcaaatcaataaaaatttaccaaatcgtaaaattagtgtttatggtccaccatcaagttcaggaacaagagatactatagaagagcttgtaatgagtgatgtgtctaaaaaaattcctgagtataaaggcgagtataaaaccatacgccaagatggtgcttatatcccaagtggtgaaaatgataatctaatcgtttcaaaacttactattgataaggatgcttttggaatttttggttatagctttttagtgagcaattcagacaaaatcaatgctgctaatatagatggtgttacgccaagcgaagaaagcatcgcagatgaaaaatacgaacttgcaagaagtttgtttatttatatcaatgctaagaaaaatccaaaagaagcctttgattttgcaaaaatttatatgagtgatgatttggcaaaaagtggtggagagcttgaaaaaataggacttgttcctttgagtgatgataaattaaaagcttctcaaaaacacgtagaagatagaaaaattttaaatgatgagcttgtaaaagctggaaaagttttttaa

SEQ ID NO: 1096 - DNA, 1935 bp, Campylobacter jejuni
gtgaaagaatttttaaacagtcttagttatggcattagctctcacgaagtaaacaatgaatttaaacaaattttcagagaacttttaactaatcatatcattaaagaacacaaaaacaaatactatcttaacaatggttttgcctttggagtacttgatatttcgagtaaaggcacaggttttttacaatgctttgatgaaagtttcaaaaaagatcttttgatagaaaacaaaaacctaaaaggcgcaaactataaagatatagtcgcagtaaaacttctacctttaaagaaaaaacgccccagtgcaaaggtgattttggttctaaaaagagccaatgaaacctctttaatgatcaccaaaaggtatggcgaagccgtgcttggaatgaatatcaaaacaggattaagcactgccttaaaagcttctcaaaaatccttaaaagcactacctttagggacaattttaaaaatagaaaatgaaaataacaatatcatagaagttttaggacatatcgatgatgaaagcgtagatgaaaaaatctccttagctctttttaataaaaataacgaatttagcgacgcttgcatcaaagaagctctagcaaacggcgatagtgttgatgcgagtatgtatgaaaatcgcatggatttaagagccttgcctttttgcaccatagatcctatacatgcaaaagattttgatgatgcgatttattttgacactcaaaaacgagaaatttatgtagctattgctgatgttagcgaatatgtttatgcttatagtgctatagataaagaagcaagaaatcgtggattttctatttattttccacatattgctatacctatgctacctcgtcctttaagtgaaaatatctgttctttaaaacctcatttagatcgcttagcgtattgttttaaaatcacactcaatcatgaaaataaagtcataaaagaagaactttttgaaggtattatcaactcaaaacgccgttttaattatgatgaagttgatgaaattttaatacaaaaacctgatttaaaagagctttcatggctttatgagctttttgaaatcacaaaaaatttacgcaaaatgcgtcttaaaaatgcctttgaatttcgcaccgaagaattaagaatgaatttagatgaaaatttaagtctaaaaagtacagtttttgaaaaagacacgccttcgcataatttgatcgaagattgtatgcttttagccaataaagccgcagcaaaactcatagatataggtgtttttagaaatcacttaagtgctgatgtaagaaaaatcgataagcttttaaatgaattacgcgaattaggcatcgatgtaaattttaagcccaatcttcctgagctcatacgcgacatacaagctttagctgatgagttaaatttaagagcagaagtagataaactcatcatcaaagcacaaaaaaaagcggaatattctagcgtcaatgcgggacattttggcttaggttttgataaatactcacattttacaagccctataagaaggtattctgatcttattttgcacagacttttaaaagccaagcaaaaaaacgatgaaaaactttttaattatctacttttaaacatagaaagcacttgtgagaatcttagcacacttgaaagagaggcggataaggttgcttttgattttatggatagaaaatttgctagatgggcagctaaaaatataggcaaaaaatttaaagctttagttgtccaaaatgatggagtttgcatagccaaactagatgatgaaatcaaaggagcggatataatcctttatgatacgcgtgtaaatttgctagaaaatgttgaagtacaaatcatggaagcggatatagttatggcaaaaatttatgctaaaatcacccaaagacttataaaggaagaaaatgtatag

SEQ ID NO: 1097 - DNA, 1524 bp, Campylobacter jejuni
atgataaatagaatttttatgaaagaaaatcttggttttaaaaaggctgagcttgaaatttctaaagggcttaccgtttttacaggcctaagtggagctggaaaatcggtcttgtttaaaggaattttatccgcattttctttgagtgaaagtgaggctaaaattgtcgaaatagaagtagatgataagttggatttagaaagttttggtatagaaagtgaagaggagaatgtttttaagctcttaaaagaaaaaaacacaaaatattttattaacaatcaaagcatagcgaaaaaaagtttgcaaaatttaagtaaaacttttattaagtatttaagcgcaaaggaaaataacgaatttggaaatgaaaaatttttaaatctcttagatgccttggagatgcaagaaaatacaaattttgtttcctttttagaagattttaaaaaagattttaatgcttatagtcaaatttctaatgagcttaatgcaattttagaagaagaaaaaaaagtagaagaattaaaagaactagctagagcacaaattgaaaaaatttcaagcattaatcctaaaataggtgagtatgaagagcttttaatacttaaaaaaaagctttctaaaaaagataaattagaagaagcttggagtaaggcagagcgtatttttgagcttgaaaaagttgttattgaagctttaaatttaagcgaagttgatgcgagtttttttagtgaatgtttaaatgaattgcgtgtgatttgcgaaaatcaaaaaatggaagatttggattttgatgtggaggcgcttttagatcgcattgaaaatttatcctatcttatcaagcgttatgaaagtatagaaaatgctttagaagttttaaaacaaaaaaaatatgagctagagcattatgaaaatttaagttttgaaaaaaaagaacttgaaaaaaaatttcaagaattaaaacaaaaattagaagaaaaagcacaaattttaactcaaacaagaaagaaaaaccttaaaaaattagaaaaatgtttaaataattatcttaaagatctttatatgaaagatgcaagtttgacgcttaaagaaaatgaaaaaatttcaattttaggcaaagatgagataatgctagatattaatttagctcatttaaaaaatttaagttcgggtgaattaaatcgcttaagacttgcttttatagccacagaatgtaatattttaaatgcaggcaaagggatattatttttagatgaaattgatgcaaatttaagtggaaaagaggctatgagtatagctaaggttttagaggaactttctaagttttatcaaatttttgctatttctcatttgcctcaactttcctctaaggcacataatcattttttagttgaaaaaaatggtgaagaaagtaaggtaaaaaagcttgatcaagaagaaagaattaaagaacttgctaggatggtaagtggagagcttgttagtgatgaagcgatcgaatttgctaagaccttatttaagaattaa

SEQ ID NO: 1098 - DNA, 1806 bp, Campylobacter jejuni
atgagaatgcgtttagttgttggatttatactattgttttttatatttttattaagtcgtgtgtattatttgagtataaaatcaaatgtatattatgaagagcttgctaaacaaaatgccataaaaactgaatttttaccacctgttaggggtcaaattacagatagaaatggaactttattggctattaatgatttgggttttagtatttctattaaaccttatttaagtattaaaaagtcaaataaaggaattttggataaagaattatctgaacttacaaatttatttcccgatttaaatgctagtaaattagcagaaatttataagagaaatgattcttactataatcaagattttattaaagtagtagattttataccctatgatgagattatttcgcattattcagagttaaatcttaataaaacaataaaaatagatcctgttgtaaaaagaaaatatccttttggaaaattggcttcgcatattattgggtatgtaggtaaggcaaatttgcaagatgttcaagaaaatgaaatagcaaaactttctaactatacgggaaaaagcggtatagaacgctattataatgatattttacaaggagaaaaaggaactagggtttataaggttaatgccttaaatcaagaagtagaacagctttcttacactcctgctatgtctaatgatatagaacttacgatagatatagagcttcagtcttatttaacttcattgtttgaagggaatgctggagctgctataattatgaatgtaaatgatggatctattttagctgcagggagtttccctgaatatgatcttaatccttttgtaacagggatttcttttaaggattgggatgagctttcaaatagtcttgatcatccttttacaaataaacttataaatggatattatcctccaggttctgttgtaaaaatgggagtagggctttcttttttaaattctaaaaatattagcccgtcgactcattatgtttgcaatggaagcattgagcttggaggcaggttttttagatgttggaatcgatcaggccatggacctgtggatttaaaacatgcgataaaatatagttgtgatgtttatttttataatggcagtttgcaagttggaatcgatcaaataagtgaaactttatctcgcattggctttggagtgaaaacaggggtagatttacctagtgaatttgtaggaactttaccaagcaaagaatggaagatgcaaagatatagacaatcttggtttcaaggtgatactttaaatacagctataggtcaaggtaattttcttgcaacacctatgcaaattgctagatatacggctcaaatcgcaaaaagtggagaggttatacctcattttttaaaaagcatagaaaataataatacaactatagaaaatcaaatggatgaaaataaaaaagaaatttttactttatttgaaaagagtcaattgccttatataagagatgcaatgtatgctgttgctaatgagcaaggaggaacctcttatcgttatttgcataatcttgatgtgaaagttgcagcaaaaacaggaactgctcaggttgtgggattttcacaaacagataaaaatagggttgatgaaaaacaatttgagtattatactagatctcatgcgtggcttacttcttatgctccttattctaagccaaaatatgtagttaccgttcttttggaacatggtgggagaaatattacttcaggggcaactgtagctaaaatttatcaaaaaatgattgaacttggatattttaaataa

SEQ ID NO: 1099 - DNA, 438 bp, Campylobacter jejuni
atgaataaagcttttactctgcttgagcttgtttttgtgattttgattttgggaattttatcaagcttatctttatcttttatcaatactacaaaagatgaggttaaaattttaaaattaaaaatggactatgaaatgctaagctcagctcttgctttaatgcgtagtcaaatgagacttaaaaatttaaattttccagaaattttagataatgcacaaaacaatcaagccaaagaaaaactcttttattgtttaaatgattgtgattattctttgcttgatacacctatttattctgattttaaatcttggataaaaataggtaaaaatcactatagatttgcattaaacgccaaagagatggttgaatttatttatgattctaaagaaggtttgttaaagtgtataggaagttctagatgcaaagatctgatataa

SEQ ID NO: 1100 - DNA, 699 bp, Campylobacter jejuni
atgaaaaaagttttattttatgtgttaccgtttgcattttttggttgttctgcaacggttgatccgcaaatttcaatgaaaccacctgcttatgtagaagaacttgcaccaaaacaaagcaataatgtagaaagtgcaccaggatcgctttttggcaaaggggataatcctttattttcagataaaaaagctatgaatgtaaatgatttagttacagttgttatacaagaaagtaccactcaaagcacacaagctaataaagcaacaagtagaactaatacctcaaatttaggcggaggtgctttaacaggaagttcaggagtggtagctaatgctcttaataaagtcaatgcttattctaatataggctttcaaaccaatagttcaaacaactacacaggaacaggctcgcaaagcagaaatgaaagtttcaatactacaatttcaacacgtgtaattaaaattttatcaaatggtaattattttatcgaaggttcaagagagcttttaatcaacggagagaagcaaatcatacaattaagcggtgttattcgtccttatgacatcggtcaagacaatactatagatagtaaatatatagcagatgctaaaattctatataaaacagaaggagaagtggatagaagcacaagaaaaccttggggtagtaaagttatagaagcgatatggccattctaa

SEQ ID NO: 1101 - DNA, 1191 bp, Campylobacter jejuni
atgaaaattttagttttaaattcaggttcttcatcgattaaatttaaattttttgataataaagtcgttaaagcgagtggcttagtagagaaaattggagagcaaaattcaaaggttgtattaaaaaatactttaaataatgaaagttttgaaagagaattaacaataaataatcacgaagaaggccttagtatagttaatgagctttttaaagaatcaggaattttagcagatttaaatgcgcttgatggctgcggtcatcgtatagttcatgggggaagaaatttaagcgagcattgtttagtggatgattatgttcttaaagagatagatagggttagtatttttgctcctttgcataatcctgcgcatttagcaggtataaaaacaatgatcaaagctgcacctagtgttgctaatgcagctatttttgatacagcttttcatcgcactatgcctgattttgcttatatgtatgctttgccttatgatttttatgataagcataatattagaagatatggttttcatgggacttctcatgcttatgttagttctagagcggcaaaatttcttcaaaaagatcaaaatgaattaaatgtcatctctgctcatcttggaaatggtgcaagtgtatgtgctatagaaaaaggtaagagtgtggatacttctatgggatttactccacttgaagggcttgttatgggaacgcgttgtggagatttagatcctgctattttaccttttattagccatcttaagggtttaactatagaagaaatagatacactgatgaataaaaaaagtggagtatatggaatttgcggttataatgattttagagatatagaaagagagatagaacaaggtaatgataaagcacgcttggctcttgatatgttttgttatcgtcttgttaaatatataggatcctactttgctgtgttgccaaaaaccgatgctattatttttacaggtggcataggagaaaatgatagtttggttcgacaaaaagtatgtgagagattagctcatcttggtatcgagttagattttgaacttaacaaacaaaggatttcgggcgaaagaatgataaatcatgcaaattctaaagttaaagtgcttgttattcctacagatgaagaattagaaatcgctagaattacagaagaacttatcggtaaaaattaa

SEQ ID NO: 1102 - DNA, 3753 bp, Campylobacter jejuni
atgaattactatcaagaacttaaaaaatacctcaacaataatctttttacaagctattctttagaaattgactttcctaagatttataatttcaacgcaaatcaaaaagcctttagagatattttaactaaaattacaaaaatttacgacaaaaataaatttataaaacaaaacgaacatcaatttgaagatgaatttatatcaaaagtattagaaattttagggtggtgctttgtaagacaagatgaaaaaatcatacaaggaaaattggaaaaacctgattttctactttttagcaatgacaaattaaaatcaaaatacgaaaatttagacaaagaaacaaaaaaatcaagcaatgatttcacaatcattttagagtcaaaagcttataatatagaaatagacaataaaaaagtaaaagacaaccctcactttcaaattctaagatatctaggcaatcttaagaaaaattatggttttttaaccaatggtagattttggcgtttttatgataattctatactgaattcaaacaaagttttttacgaaatcaatctagaaaaaatcattgaagatcaaaatattgaagcttttgcgtatttttatagtgtatttagcgcttttaatttcacagaaaaagaagatcatttagaaataactctacaaaacaataaactttcaaaaatcaaaatagaagatgatttaaaatctatcatttacggaaccaatggaaatgaatctttatttgaattcataggctctagaatttacaataaaacaaaggcggatttaaaactaatctatgaaaattctttatattttatctttaggcttttatttattgcttattttgaagataaatttgaaattatactagaaaaacataagtattttaaaagtaaaatcagtcttagaaccttacttgaaaatttacaagaagatgaaagctcaagtggtggctttggagaacttgaaaatattttcaacatttacaacaaaggcaaaggcaattttgacatgcctgtttttaatggcggtttgtttgatgagagcaaaaccgctcttttaagcacgccaaaaatctttaacgataaagatttaaaattcattttaaaccaattattaaattttaaagataaaaatctaagctttaaaagagattacaaaactttaagtgtagaacatttaggcacgatttatgaaggcttgctttcttatttttttgaaatagcaaatgaagatatttactatgtaagctataaagaaaaatcaaaagaaatagaatgttattttgataattatgatttcaaaattttagaaaaatcaaaaaaagtagaaaaatacaccttttacaaaaaaggacaaatttaccttaaaaatactagcaactcaagaaaagcaagcgcaagcttttacacacctcaatccatagctaattttttaatccaaagtgctttaaaagacaaactaaacaatgaaaatattttgaaatttaaaatactagacaatgcttgcggtagtggacattttttagttggagttttaaacgctattacacacattgttttatcagattttgatcattttacaaatttaaaagaactttacgaagaagaaaaagaaaatattttaaatcatataaaagattttgtgcaagactatgaagtagatgagagtgatattttaaaacgacttttactaaaacgcattatttatggagtggatttaaacccttttagcatagagcttactaaacttagcctttggatagatagttttatctttacaaccccactttcttttatagaacaccacataaagtgcggcaatgctttgataaattctaacctaagtgattttaaagatttgataaaacaaaactcaagcaacctttttacaaattccataacacaagaatttgaaattttacaagaagtatttgaaaaacttgacaatctaaaagataccaacgaagaacaaatcaaacaatctaaacaaatctatcaaaatgaaatcacaccaaaacttaataaactaaatttatatctaaactatatcaacacgcttcattttgtcaacaaagaagaattacaaattctaaaagccctaagtcaagatgatatacaaaatttaagccaaaatgaacaagcaaaagctatcattagcaaatatcaaaaagaatttaatttctttaactatgagttagaatttcctgaaatcgtagaaaatcaagtctttaaaggctttgatatcatcataggtaatccaccttgggataaaactaaatttagtgatagtgatttctttccgcaatataaaagcgattatagaagcttaatcgctagcaagaaaaaagaaattcaagataatttgctagcgaaagattatataaagcaaaattacgaaaaacaaaaagcatatataaatgatttaagcgagtattataaaaaagcctatcctttaaacaaaggcagtggagatggaaatttatttcgtctttttgtagaaaaaaatctttctcttttaaaacaagatggaaatttagcttatgtacttcctagtgctttgatgtttgaagatggaagcttaattttaagaaaagaaattttagaaaataaaactttagagtatttttatagttttgaaaacaacaaagctatctttatagatgttcatagaagctataaatttgctcttatgcttataaaaaacacgcaagcaaatcacactcataaaatcaaaatgatgttttataaaacagatataaactcattaaaaaacaaagatgaaattttaactctaaatttaaaagatatcaaaaagctaagcccaactcacctagccttaatggagttaaaagacaagcaagctttagaaattctaagaaaatcttataatgcttttcaaaacttgtcttttgattatatagattttagaagagaacttgatatgacaaacgataaagatttgtttatagaagagtttagggaaggacttttacccttatatgaaggtaaaatgatacatcaatttgatgcaaattttagccaagctacttattttttagaaaaggctaaatttgatgagcgtttaaaaagtaaagaactttatagagctaaaaaagctactgggaaagaattaaatcctaaattaataaaatacgatagagaattttttagactcggatatagaaaaattgcaagtgatacaaatgagagaactttgatagcttctttattaccaaaaaattgcggtggagctgatagtacttatagtaacattccaaaacaatatgttttaaaagatgatgtaatttgcatggatatagtgccttatgaaagaattttatttgttttagctttgtttaattctttagtggttgattttatcataagaaatatggtgcaaatcaatgtaagcaaatcttatttagaaagaattcccctgcctcaaccaagtgatgaagaaattcaaaacaatgaaatttataaaaccctcgctaaaaatgctttgcttttacagctttacaatgatcaaaatcgtcattttgatgagctaaaacaagaatttaatataaaaaatgaagaaattccaaaaactaaaaaggcttatgatatcttaagagcaaaaaatgatttattggttaaagaactttatggtttaagtgatgatgaattttcttatatgataagcacttttaaagttttaaatgaaaagcaaagtgaatatataactttgctaaaaactatataa

SEQ ID NO: 1103 - DNA, 939 bp, Campylobacter jejuni
atgctagaagatgattttataaaagaacgccaaaacatacgccaaaaaatgctgaaattttctcgcgccataaatcaaggcaaaccgcttgatgatgatttaagagatgaaatttctagcgatgatattttaagacgtcgttttaaaaaaaagactcctaataaattcttagaagaactcgatgaagagtatgagtcaaaacatactaaaaaatcaaatatatatttaaaagaagatctaatcaatgttaaattagaagaaaagcaatctcttgctaaaaaaattttttccaaaatgaaagaaagaagaaaagaagaaaataaaaaaactaaaaaaaattttttatttagcagaaaaaaagcaaacgaaataaaaaatatccaaaccaaaacacaaattcaaacaaaaagcaatcaagctaccactcaaacaaaacaagaaaaaaaggaacttacaaattctatagaaaaaattcaaaaaacagaaactaaaatacaaaaacctctaattatagaaaaaaaactagatgttaaaaatcaacctaatatcaagaaaagtttagaaaatttacaaaaaaaaataacaccacaagaaaataaacaagaacttccaaaaccatctaatcaagctcaagaaaaacaacaaaatgatgaagatgctcaaaaggcaaaaaatattttactagaaggcttctctaatgctaccaaagaagatagaaacctaaacttcaatcatcttctttttgcagctttacttgttagttttgcattatttttatttgccccacaaatttatattagaaatcaaatttattatcttagtagagagattgctacattaagaacagaagaaagtgttttaaacgaggaaaataaagacttaaaaagaagacttgaaaatatgcgattccaaaatcaaattttagattatttagaatga

SEQ ID NO: 1104 - DNA, 1113 bp, Campylobacter jejuni
atgagtgaatttttagtagaagaaatgcaacataataaaggtgcaaaaattaaggttataggctgcggtggcggtggcggtaatatgattaaccatatggttaaaatgggattaaatgatcttgatttaattgcagcgaatactgatgcacaagctatttcaatttcattagcaaaaactaaaattcaacttggcgagaaaaaaactaaaggtttgggcgctggtatgcttcctgaagtaggtgcagaaagtgctagagaaagttttgaagaaataaaagcaagtcttagtcaaagtgatattgtatttattgcttcaggttttggtggaggtactggaacgggtgccactccagttattgcacaagcagctaaagagattggagctttaactgtttctgttgtaactatgccttttgcattcgaaggaaaacaaagaaaaaaacttgctgaaagcggtctccttgagcttaaaaaagaaagtgattctattcttgtaattcaaaatgaaaaattattgagcattattgataaaaaagcaggtattaaagatgcttttaggttggttgatgatattttagctcgtgctgtaaaaggtatggtgtctatcttacttgataatggagatattaatgttgactttgcggatgtaagaaccatcatgagtcatcgcggactcgcgcttatgggtgttggtagtgctagcggtgaaaatgctatagaagaggctctttcaaacgctatagaatctcctttgcttgatggaatggatattaaaggtgccaagggagttattttacattttaaaacaagttctaattgctctttgtttgaaatttcggcagcagcaaatagtatacaagaaattgttgatgaaaatgctaagattatttttggttctactacagatgatagcatggaagatagagttgaagtaactattattgcgacagggtttgaagataaagatacagtagctaaaaaatctaccgaagaagctcaagcttctaagaaaaatccttatttaagtcttaaaaaggtaagcggtggttacgatgaagagataatggcgcaaattgaaacaccaactttcttgcgtcgtcaaatggattaa

SEQ ID NO: 1105 - DNA, 1431 bp, Campylobacter jejuni
atgggaaaatttgttaataatatagatgattttttcaaattttgcaaacaaaatgaagtgctttttgttgattttcgttttacagatatgataggaacttggcatcatattacctataatcttcatgcaatcaatgaagaaacatttcaaactggcattccatttgatggaagctcaattcatggatggcaacctatagaaaaatcagatatgattttaaaacctgatgctcaaagtgcttttttagatccttttacggctgatcctactatcatagtattttgtgatgtgtatgatatttacaaaggacaaatgtatgaaaaatgtccaagaagcatagcaaaaaaagcaatagaacaccttaaaaatagtggcatagctgatactgcttactttggaccagaaaatgaattctttgtttttgatagtgtaaaaatagttgatactactcattgttctaagtatgaagttgataccgaagaaggagagtggaatgatgatagagaatttaccgatagctacaatactggacacaggccaagaaacaaaggtggatattttccagttcagccaattgattctttagtagatattcgttctgaaatggttcaaacccttgaaaaagtaggtcttaaaacttttgttcatcatcatgaagttgcacaaggacaagctgaaataggagtaaattttggcacgcttgtagaagcagctgacaatgttcaaatttataaatatgttgtaaaaatggtagctcatttaaatggcaaaactgccacttttatgccaaaacctttatacggagataatggcaatggtatgcatgttcatatgagcttatggaaaaatggagtaaatttattttacgataaagatggatacagtggacttagtcaaactgctataaattatataggtggaattttaaaaaatgctagaagtgttgcagcttttacaaatccaagttccaactcttacaaaagaatagttcctggctttgaagctccttgtattttaacttattcttgccaaaacagatcagcaagttgtcgcgttccttatggcataggtaaaaattcagctcgtatagaaattcgcttccctgatagcactgctaatccttatttagcttttgttagtcttttaatggcaggtcttgatggaatcaaaaataaaaccattcctgtgggtcctatggatgaaaatttatttgatcttactttggatgaaatacgtgaaaaagggatagagcaattaccacatactctaagaggaagtttggaagctttaatccgacataattcttatttaaaacctgtaatgagcgatatttttatcgatgactatcagcatttaaaatttgaaacacaagtttggccagtagaagctcgtccaactgcttatgaatttaaaacttgctactcttgctaa

SEQ ID NO: 1106 - DNA, 864 bp, Campylobacter jejuni
atgactttttcacaaatgatacttaatttacaaaattattggcaagagcaaggttgtgcgattatgcaaccttatgatatgccagcaggtgcaggaacctttcatccagcaacttttttaagaagtttaggaaaaaaaccttgggcagctgcttatgtggctccaagtagaaggcctactgatggacgttatggtgaaaatcctaatcgcttaggtgcttattatcaatttcaagttttaattaaacctagtcctgataatattcaagaattatatcttaaaagtcttgaaaatttgggttttgatttaaaaagtcatgatattcgttttgttgaagataattgggagagtccaagtttgggtgcttggggtttaggctgggaagtatggcttgatggtatggaagttactcaatttacttattttcagcaagttggcggtatagcagtagatttagtaagtgctgaaattacctatggtcttgaaagaatagccatgtatcttcaaaatgttgataatgtttatgatatagtttggagtgaatttaatggagaaaaaattaaatacgcagatgtgcataagcaaagtgaatatgaatttagtaaatacaattttgaagtaagtgatgttaaaatcttaaatgagcagtttgaaaattcttacaaagaatgtaaaaatattttagaacaaggactagctttacctgcttatgattattgtatgcttgctgcacatacttttaatcttttagatgcaagaggagcaatttctgtagcacaaagacaagattatatgttaaaaattcgtgaactttcaaaaaattgtgctgaaatttataagaaaaatttaaatgaagctgagtga

SEQ ID NO: 1107 - DNA, 1338 bp, Campylobacter jejuni
gtgtttgagttagtcagcgaatcttttaaatcagcgattaataaattacgttttgttgatgatgaaaaagcacttaagaacgctttagaaaccttaaaaaaagctcttttaaaagcagatgttcaccataaggtaactaaagagcttttgactttgatagaagaagatgcaaagcaaaacggaataggtcaaaaacaatttttaaatgccattaaaataaatttagaaaatattttaagtgtcaatggcaaaaatcaaggttttgtttttgcttctaaacccccaacagtagttctaatggcaggtttgcaagggggcggtaagactacaagcactatcaaacttgcaaattatttaaaattacgcaataaaaaagttttagttgcagcttgtgatttacagcgtttagcggcagtggagcagctaagacaactttgtgaagctaatgaaattgaacttttcttcatagaaaatgaaaaagatcctattagggttgctaaagaggctttaaaaaaggctgaaagttctatggtggatgttttgcttgtggatactgctggacgtttggctatagatgaagctttgatggatgagttaagagcagttaaggatgtcttaaatcctgatgagattttttatgttgctgatgcaatgagtggtcaagatggggttaagactgctgctagttttaatgaagttttaggtatcagtggggtaattttatcaaaatttgatgcagatactaaaggtggagtagccttaggtatagcaaaacaaatcggtattcctttaagatttattggtgtgggtgaaaaagtagcagatttagaagtttttataccagatcgtatagtaagtcgtattatgggtgagggtgatttggcaactttagctgaaaaaactgctgcgattattgatgaaaaagaggctaaaaaactcaatcaaaaaattaaaaaaggtgaatttaattttaatgattttcttaaccaaatggaaagtattaaaaaattaggaagtatgaagtctttaatcggtatgataccaggacttggtggaatggcaaatgcggtaaaagatatagatttggataattctaaagaaatcatacgcattaaagcaatgatttcttcaatgactccaaaagaaagagaaaatcctgatttattaaataatgctagaaagcgtcgtatagcagagggagcaggtctttctcaggtagaagtcaatcgttttttaaaacaatttagcaatgcagcaaaacttgcaaaaagattttcaggtaaaaaaggaatggagagtttgacacaaatgatgagtcaagctagaagacagttttaa

SEQ ID NO: 1108 - DNA, 3603 bp, Campylobacter jejuni
atgagtcaatttacacacttgcatttacatacagaatattctttgcttgatggagccaataagcttaaagaattagctttgactttaaaagagcagggtgctacaagtgtggctatgacagatcatggaaatatgtttggggcaattgatttttatcaaacaatgaaagcacaaggtttaaaacctatcattggtatagaagcgtatttgcataatcatgatgagttagatgataaaagttctcgtcagcgttttcacctttgtttgtatgcaaaaaatgagattggatatcaaaatttaatgtatttaagttctcaaagttatattaaaggtttgtattattatccgcgtatcaataaaaagcttttggaagattatagcgaaggtcttatttgctcttctgcttgcttgcaaggtgaagtaaattggcacttaaatacttatagtgaaagaaatgtgcgttttggtgcaaaaggctatgaagcagcaaaagaagcggcattatggtataaaaaagtttttaaagatgatttttattttgaaatcatgcgtcatggtataggcgatcaaagaatgatagatgatgatattatcagactttctaaagaattaaatataaaaatcattgctacaaatgatacgcattatacttttaaagaaagagcggctgcccatgaggtttttatgtgtatagccatgggaaaaaaacttaacgatcctgatagaatgcgtcatagtgtgcatgaattttatgttaaaagtcctgagcagatgagtgagctttttgcagatattccagaagctatagaaaatacacaagaaatcgcacaaaaatgtaatttagagcttaatcttggcaatcccactccaccgaattttaaatttacaagagaatatgctaaagatcataatattatcttacctgaagaaacaaaagaatttagctttgataatgatgacatggtttttgaagaactttgcaaaaagggacttgaagagagattaaaatttatcgatgaaagtaagcatgaagaatacaaacaaagacttgaagtagaaattaacatcattaaaaatatgaaattttcaggttatatgcttattgttcatgattttattaaagtggctaaggataaaggtattccagtaggccctggaagaggatcagctgcaggaagtttggtttcttattgtttaaggattacggatttagatcctattccttatagtctactttttgagcgttttttaaatcctgagcgtgtgagcatgcctgatattgatgtggatttttgtcaagacagacgtgctgaagtgattgattatgtgattgataaatatggagcggataaggttgcacaggtgattacctttggtaaacttttggctaaaggggtgattcgtgatgtggctagagtttgtgatatgagtattcaagatgctgatgagcttgctaaacttgtgcctgaagagcttaaaatcactcttgatgctgcttatgaaaaagaacctaaaatcaaagaatttatcgatcgtcatcctaaaggtcttgaagtttgggagtatgcaagagctttagaaggattaaatcgcaatgcgggtatgcacgcagcaggtgttgtaatttctaatgaaagtttatggaagaaaactccgctttttagacaaagtaaaaatgatgaaagacatttggtaacgcagtattctaaagatcatttagaagatgtggatttgataaaatttgactttttaggtcttaaaaccttaacagtaatcaataatgcgatcaagcttattaaaaagcgttacaataaagacattatttgggaaactatagatgtaaatgatagcaaagtttataaaaccatacaaagtggaaatactttgggaatttttcaaatcgaatcaggcggtatgcaaagcttaaatgcacgcttaaaaccagagcgttttgaagatatcattgcggttcttgcgctttatcgtccaggccctatggaatcaggaatgcttgatgattttatcgacagaaagcatggtttaaaaagtatagaatatccttttgacagtttagaaaaggttttagagcctacttatggggttattgtttatcaagaacaggttatgcaaattgttcaaattataggtggcttttctttaggaggtgctgatgtagtgcgtcgtgctatgggtaaaaaagatcctgagaagatgaaaaagcttaaaactgattttgcagatggagcagaaaaacaaggatatgatagagcaaaagctgaggatttatgggagcttatcgtaaaatttgcaggatatggttttaataaatctcactctgcggcttatgcattgattacttttcaaacagcttatttaaaaacttattatcctagtgaatttatggcagcgcttttaacaagcgaagaaaacaatgtggataaaattgctgtttatattgatgagatgaaaaaaatgaatattaaacttttacctccatcgattaacaaagcgatccgtgaatttagtgctttagagcaagatggcaaggatgctattatatacggacttggggctataaaaagtgtgggtattcctgcagttgaaaatttacttgaagcaagacaagatggagaatttaaggatattaatgatttcttaggtaagatagatcccaccaaaataaaccgtagaacattagaaagtcttattaaggcaggggcttttgatgagtttggttttactagaaaagctttgtttgataatatggaaaatcttagcgaagcatcgcgtaaaatggctgaagtaagaaaaaatgctgcaagttctctttttggtgaagaggaattaacttcaggtgttcaagtaaattttactcccaaaaatgaagaatttgaagtgatggaaaaattaggatatgaaaaagaaattttaggaatttatgtttcaggccatcctttagatcgattttatgaacaaattaatgccatagattatgttaaaagtttagattttgaaagtttaaaaaacaatggagaaattttaagtataggtaaaattgaagatttcaaatccatgatgagtaaaaataataagcgttatggtagaattgaaattttggattattattcttcgtttgatgctactgtatttgaaagcaatgtagaagaaatagaaaacatcatcaaagatgaaaatttaaaaaataatgcctatggttttgtattgggatttaaagctgaaggaggggagaagcctagcttttttttaaaagcaattaaagatttgcaaagtcttgaagatggcgagattaaagctataaaaaaatttggagcaaaaaaagattttaaaaataaagaagaaaatcattttaccgcagaacctaaggaatttgaaaaaaatatcatagagctagatttgacaagattgaatagagaattaatctatgaaattcatgaaattgctagaaatgcacataatcctaatgaaaaaaataataaaaaacttgttttaaaagttattagtgcgggatcttgcttgctttatcatacagattttattatctctgatagtatagtagaggaaatttctaataaatatgcttaa

SEQ ID NO: 1109 - DNA, 750 bp, Campylobacter jejuni
atgatgatctctgatgcaactatgatgcaacaaaattattatttaaataatgcacaaaaagctagcgataaagctttagaaaatattgcagctgttcgcgcaataagtggagttgatagtgctaatttagctattgctgattctttaagatctcaatcaagcactatagatcaaggtgtcgcaaatgcttatgatgctataggggttttacaaattgcagatgctagccttaccaatatctctcaaagcgcagatagacttaatgaactttcagtaaaaatgaacaatgctgcacttaatgattctcaaaaaggaatgctaagaacagaagcaacacgcatacaagaatccatcaatgattcttttaataatgcaacttataatggaaaaaatgtctttcaaactatgaattttgtagtaggtagcggaactgaaactacaaatttaaatccattagcaacagatggattaagcatagatagtcaagatagtattacaaattttatggatcaacttggaagtttaagaagtgaaataggctcaggtatcaatgccatcacatcaaatattaatgcaagtgttcaaaatagcatcaactcaaaagcagctgaaaataatttactaaataatgacatggcaaaaaatgtcaatgattttaatgccaattatctaaaagaaaatgctgctgcttttgttgctgcgcaatccaacatgcagcttcaaagcaaaattgctaatttattacaataa

SEQ ID NO: 1110 - DNA, 1188 bp, Campylobacter jejuni
atgactttaattgcaattttatgtctttacacagcacttttatcttggatttcctatgctcaaattcgtttcttagaaagagaaaaagacaaacaagctcaaattttaagcgaaaaagactatcaaaatgcagcagatattgccatcgaaaatgaaaaatttaaactattttccaatttttataatttaatcatcagtattgcatggataggttttggatttttataccttaaagaattacttatcttaaacaacactcgttttgaaaatactttatttttattatcttttttaataatcacaagtattttaaatctacctttaagtatttatgaaagttttatcaaagataaagcccatggtttttcaaatatgactgtaaaactttttatcaaagatactatgaaaagtcttattttaactttaatatttggatttttaatcctttatactttgcttttttgctatgatttttttggaactttttggtggattgcggcctttatttttgccttttgtattatagtgattataaatctcatctaccctaccttaatagcacctatttttaataaaatgaaaaaactagacgatgaaaatttgctgaaaaaaatcagctctttgatgaaacaatgtgggtttagtgcaaatggggtttatgttattgatgcaagcaaaagagataagcgtttaaatgcttattttggtggactttttaaaagcaaaagagtggtgctttttgatacattattaaaagccttaaatgaaagagaacttttagctgttttaggacatgagcttggacattttgttcataaggatattatcaaagctttatttaacggcgctataactatgtttttacttttttttgtttttgcaaatttacctgaatttgtttacttagaaagtcatctagaaggagtaaatggtggcgtgtttgctcttttgtttatcttggcgaatatttttagctttttaatctctcctatgcttaatgccttaagtagaaaaaatgaatttgcagctgatcaacacggagctaaagttacaagcaaagaagatatgaaaaatgcattgatagctctagcaagagaaaataaagcttttatcaaaacaagtaaaatatatacatttttttatctcagtcatccaagtattagtgatagaatcaaggctctttcttga

SEQ ID NO: 1111 - DNA, 1077 bp, Campylobacter jejuni
atgaaaaagatgagtaaacatatagttttatcatttgcggtgagttctttgctcttttctcaagcttatgctttactaagtgggggtaaatttactcatggtacaagtgggactatccatacctctggcaatactgtaacgattacaggaaaaggacaaaatcatgttatccaatggggtggcggttttaatataggacaaaatgaaagtgtaaattttaacggcaaaaatcaaaactacctaaacattgcttatcaaaaagatgcttctaagatagacggagctttaaatagagggaataacaatatctttttagttaatcctatgggagttttgattggcaaaacaggaactattactgcgggaaaatttgtagctagcacaacagctttaagtgatgataatgtcaaaacttttttagagaaaggagctagtttctctccggcatttgatgtaagcaaacaaggaaatattataaatcttggaaagatcaatgcagataatattgttttaataggaaataaggttgaaatcaataaaggaaaaattactttggatgtattaaaacttgaaggtaataaagtttatgttgatgctggagtggtaaaagatacaaaaaatatcgtagccaaagcagagcaagaagctatcattcaacaaagcataacaagttttgaagaagatggagctttattgggtaattctagtagtaaatttagttttgatgatagtagtaaagttaaaaactggactaaatatggaagtattgcggatgcaacagaatggaataaatttgctgatttttggaatgtaaataaagaaaaatttagaacagcttttgatcattttcgtttgattgatgatattgattttagtggcgtgaaaacatacatagtaggtgataatacaagcaatgcttttgctaaatctttcgatggttctggttatgctttaaaaaatgttaatattaattcatcaaatcaatatgtaggaatttttggagttgttcaaaatagctatataagaaactttaatattcaaggattgaaaattgcttcaactggttatgatgcttag

SEQ ID NO: 1112 - DNA, 684 bp, Campylobacter jejuni
atgaaaacatttataagcaatcataaaaaccaatcttcttttatcactttatttgtttttacacctttattttttgtttttctttattctaaagattttttacacatacaacccaatgaaactattaaagaaaataaatttaatatggcaatcaaacattttgtacaaaattcctccgatatgaaaccgacacaacccacacaaactatacaagagccttcgaatgtgcaacccaaagaacctgtgcaagaaataaaaaaaataaaacctagaaaagaaaaacctatcgctaaacctaaaaaaataatccctccagcaaatgcaaaggcaataagtcaacccaaaaaagatacaaacatgcagcaacaaactccacaagccagctcttaccaaagcgtatctttaactagtaatagtgagcttttaaaagaaataaaatcagcaatcgatgaagccctaatctaccctagacaagctagaaaaatgcgtatgagtggggaggttcttgtagaatttacctggacaaaagaaaagaaattagaaaatttaaaaatacttaagccttcaaaatatgattttctaaataaaagtgctttagaaactatacgcatagcttctaaaaaatttccacaatatgaaaaaacttttcatataaaaataccattggtatataaattaagctaa

SEQ ID NO: 1113 - DNA, 2091 bp, Campylobacter jejuni
atgaaaaaaatatgtctatcagtttgcgccattggtctcttaagctccaatgccatatcgcaaaatgtagaactagatagctcaatcgttagtgcttctggctttacccaagatattaaagaagctcctgctactatcaatgttatcactaaaaaagaattacaaagtaagccttatagagatgttgcagaggctatcgcagatatcccaggcgttgatttatatgctagcaagggaaaaacaggttcttataatatcactatgaggggtattactggatatactttggttttgattgatgggcgtcgtcagggtattggcggagaggtgggccctaatggttttaatgaaatttcaaattctttcttacctccgatttctagtatagaaaggatagaagttataaaaggtcctatgagtactttatatggctctgaagctttaggcggggtggtaaatatcattaccaaaaaagtaagtgataaatgggaaacttctgtaagtttggatgctcttttaaatgaaaataaagattggggtaatacttatggaacaagtatttattctagtggtcctttgatgaatgacaaattgggtctaacacttcgatttagagaattttacagacagcaatctaatgttgaatttacaaatggaagtggacaaagagttcaaggagatcaagctcaaagtcctacaaaggcaaataattttaacataggaacaagaattagttatttggctaatgattataatacctttatatttgatatagatttttcaagaaatcattatgataataaacaaggtcaattaggaaccatcacaagtccaggtagaacaccaggtagcttaacgggtggttatgcagatattatggaagttgataaatttgtgacttatttaagtcatgagggtgtttatgaaaatttttctatcacttctggtttgcaatataatagagtgagcaatgatggccgcgaagtcgtagggcaatctacacagccgtttttgggagaaaatagagatatagtcgcagaagatattatcttagatactaagtctgttattcctctaggacaaagtcatattttaagcgtaggcggtgaatataggcttgaaaaaatgcaagataaaatagctagtcctactaattttgatcagtatttattggcaatttttgcagaggatgagtatagtataaaagatgatttaagacttacttttggagcaagatataatcatcatgaaatttttggaaacaatgtttcgccaagagcttatgtggtttataatcctactaatgagcttactttaaaaggcggtgtatctacaggctttagaaccccttatgcaaaccgtttgataaatggaacttacagttatagtggccaaggcagatttcctacatatggaaatcctgatttaaaagaagagacatctttaaactatgaaatagcagctatttacaataatgatttattttatgtttcagcaacaggttttttaacgaattttaaagataaaatttcaagtcaaagttataataatagcgaaccaatcccaggtattggcacttgtgatgctgatagatgttctagagcaatcaatcatggcaaggttgaatacaaaggtgtagaacttggagcagggataagccctcttgataatttaaatgtaaattttgcttatacttatcttgatactgaagttaaagaagcacaagatagaagtgtgataggtaaacctgaacaagatagtttaaaacacaatatcatgttaaaaaccgaatacagcttctataataaaattaccccttggataaaaggcgagtggcaaatagatcgctatatgggtgatactaatatcaatagagaatattacaaggatatctttttagcttccatgggtgtgcgttatgatatcaacaaacaatggagtatcaatgcagctatttataatctttttgacaaaagctttacaaatggctgggaatcttatgcaagtgggagtggtagcacttgggtaaatacctataaccgtatagaagaaggaagaagaatgtatatttctatcaatggtaacttttaa

SEQ ID NO: 1114 - DNA, 2613 bp, Campylobacter jejuni
atgtatgataaaaatttagaaaaagagtattatcaaatttgcgaagaacgcggatattttgaaatcgatggcaataaaaccatacaagaaaaagataaaaatttctgcattatgatgcctcctcctaatgtcactggagttttacacataggacatgctttaacttttactctacaagatattatgacgcgttataaaagaatggatggctataaggttctttatcaaccagggcttgatcacgcaggtattgccactcaaaatgttgtagaaaaacaactccttactcaaggcattaaaaaagaagaactaggtagagaggaatttatagaaaaagtctgggagtggaaagagcaaagcggtggaaaaattttagaccaaatgagaacactaggcatcactcctgcatggagtcgcttgcgttttactatggatgaaggtttggttaatgccgtaaaaaaagcctttgtagaactttatgataaaagacttattgtacgtggaaactacatgataaattggtgtactcatgatggcgctttaagtgatatagaagttgaatacaaagaaaacaaaggaaaactttatcatattaaatactttttaaaagatagcgatgaatttttagtagtagccacaacgcgtcctgaaactttttttggcgatactgcagttatggtgcatcctgatgatgaacgctatgctaaatttgtggacaaagaagtgattttgcctataagcaaaaaagccattaaaatcatagccgataaacatgtagaaaaagaatttggaacaggagttgtaaaagttactcccgctcatgacatgaacgattatgaagtaggacttagacataatttagattttataagtgtttttgatgaaaaaggaattttaaacgagcattgtttagagtttcaaggtttagaacgcttagaagcaagagaaaaaatcgtagccaaacttgaaagtcttggttttatagaaaaaatagaagagtataacaatcaaataggatattgttatcgttgcaacaatatagttgaaccttatatctccaaacaatggtttgtaaaaaaagaaatcgcccaagaaagtatagaaaaagttgcgcttggagaaagtaaattttacccaaatcactggataaatagctttaatgcttggatgaaagatttaagagattggtgtatttcaagacaactttggtgggggcatcaaattcctgtgtattattgcgaatgctctcatgaatgggcaagccaacatacgcctaaaacttgtccaaaatgtcaaagtcaaaatttcaaacaagatgaagatgtgcttgatacttggttttcttcaggactttgggctatgagtactctaggctggggaaatgaaaattggggtaaagataaaatttggtctgaaaaggatttaaaagatttttatcccaattctttactcattacaggttttgatattttatttttctgggtggctagaatgatgtttcaaagcaccaatgtcttacatcaacttccttttaaagatatttatttacatgctcttgtgaaagatgagcaaggtagaaaaatgagtaaaagccttggaaatgttatcgacccaaatgaaagcattaaagaatatagtgctgatattttacgctttactttagcacttcttgctatacaaggacgcgatattaaacttagcaatgataaacttttacaagttagaaattttacaaataaaatttataatgctaaaaattatctgcttttaaatgaaagtaaatttgaagatttggaaaatatcacacttcattcagaattagcaaaatatatttatgccaaatttcaaacttgtgttaaggatgtaagagaaaatttagacaattatcgctttaatgatgcggctaatactctatataaattcttttgggatgatttttgcgattggggtatagagcttagcaaagccgaaaaatcaagcgttaaagaacttggtagtattttcaaagaagctttaaaacttttaaatcctttcatgccttttatcagcgagtatttataccacaaactaagcgatacagaacttaaaacaagcccttctattatgataagcaaatatccaaaatttaaagaacaagataaaaatatagaaaaaatcttttctttgctcatagaaagcatagttagtatccgccgtgctaaaagtttaatcgatcttggaaattctaaaatagaaaaagcttatatcaaatttaacgataaaaaaatcaaagatgaaatcaaagcttatatgaattttatcataatgctcgcaaagtgcgagcaaatagaatttagtgaagaaaaattaccaaaggcaatatgtgatgttagcgagaatttagaaatttttattacgcttgaaaatgttgatttaagtggtattttaacaagacttgaaaatcaaaaaaataagcttgaaaaagaaagtttcaagcttaactccatgctttcaaatgaaaaattcatcgctaacgcacctaaagaggtggtggagcaaaataaagaagctctagaaaatttaaaaattcaacttgaaaaaatatcagttgaacttcaaaatctaagaggttaa

SEQ ID NO: 1115 - DNA, 1389 bp, Campylobacter jejuni
atgagattattagatagtgtaacaaaagagaaaataaaacttgataaaaaagatattagtatttatttatgcggacctacggtttatgatgatgcacatttaggacatgcaagaagtagtgtttgttttgatcttttgcgtagggttttacttgctcaaggcaatagggtaaaatttgctagaaattatacagatattgatgataagattttgaaaaaaatggctcaaagtggtcaaactttagaggaaattacggaattttatatcaaaagttatgaagaggatatgagggttttaaatgtattagatcctgattttaaacctcgtgcaacgcattatataacagctatgcttgatttgattaaaaagcttgctaaggatgggtttgtttatactctagaagatggaatttattttgatacaagtaaagatgaaaaatatttaagcctatcaaatcgcaatttagaagaaaatatctctcgtctaagtaatgaagtgcaaaaaagaaatgaaagcgattttgtgctttggaaatttgatgaaaatttttacgaaagtgaatttggcaaagggcgtccaggttggcatactgaatgtgttgctatgattgattctatttttgaaaatacccttgatatacatgctggagggatagatttgctttttcctcatcatgaaaatgaagctgcgcaatgtcgttgtggatgtaagagaaaattagcaaatatttggcttcacaatggttttgtaaaaatcgatggcgaaaaaatgagtaaaagtttaaataatagtttttttataaaagatgctttaaaagaatttatgggcgaggctttaagattttatcttttgagttctcattatagatctcattttaattattctttatcggatttagaaaatgctaaaaaacgtttagataaattttatcgccttaaaaaaagattggatttaggtgaaatttctgattttgatgttttaaatgatattggaataaaaagcgaaattgctaagcaaattttagagattttaaatgatgatttaaatgtttctaaagccttagctcttttggatgattttatcagtagtgcaaatttagagttggataaagaaagcaaaaataaaattttaaaacaaaatatcaaagaagctttaagtgagctagctaaaatttttggctttggttttatggatgcaactttatattttcaatggggtgtaagcaaagaagaacgagaagagattgaaaagttaattttagaaagaactgaggctaagaaaaacaaagattttaacacagctgatgcaataagagagcaattaaatagtaaaaaaatcactcttttagatactccaaatggaacaatttgggagaaaataaatgcataa

SEQ ID NO: 1116 - DNA, 756 bp, Campylobacter jejuni
atgataactcaaactatgcaaagtaaagagagtaaagaaagtaaagaaaattctaaaataagttttgctaatgcttttttaaaacaaaatgctagtaagttaaatgaaattcaaaatgcaaattcacaaactctagcaagaagtgaagcattaaattctactaatacaacaaatactagcaataatactaattttagtataagtagtaagacaagttctcctaattatgatatatctagtgaatttaaaaactctatttatactctaaaatacaaacaagtagatataagtaatacttctactaatacagcctatggttatagtgtagataaagatggttatatgggaagtgattttaataaagctgcgggacttcctgaagattttaagatacataaatctactttggatgagattaaaaaagctgccgaaaatgatcctgttgtttcaagtacaaaagaatacttaggcgtaagcagttattattctaatatagatatagcaaatactataaaacaatattataatcttttttctaatgctctaggtcaaagcttttcaaatgataaaacaagttttagtgaagcagatataaattctatgcctagtggttatggtgtaagtggaacgcaatggatggactttaatgagccaagcaatagaatgaatattacaggtttaaaagatttttcaaattctttaatttcaaatgtttataaaacccctgaacaagcaaaagaagctgatgaaatttga

SEQ ID NO: 1117 - DNA, 1734 bp, Campylobacter jejuni
atgaataaatttttagtttcattgtttttacctttagttgcatttgcaaactcctcagaagcagctgcaaatgctaatttatttggagcttttacgcttataccacctttagttgctattgctttagcctttatcacaaaagatgttattttatcgctctttactggagttttaagtggaacttttctacttagcctttctacaaatatttttaaagcacaacatttaacttttgtaaattattacaatactacagtagaatctttttcaaaaattatttcctatatcttaggttcaacttcagatccagtaaatgcaggaatcattttacaaattctttgtataggtggtcttgtggcacttatcacaaaaatgggaggtgcaaaagctgtagcattaaaatttgccaaaagagccaaatcagctgtatcagctcaagttaacacttggtttttagggcttttaatattttttgatgactatgctaatttactaatcgtaggtccaattatgcgtcctttggcagataaatttaaaatttctcgtgaaaaatttgcctttattatcgactctaccgcagctcctgtggcaggaatagctgtaatttctacttggataggcttagaagtttctttaattaaaaccgcttatgaacacataggcattagcaatattagtgcttttggaatttttgttgaaaccataccttatcgtttttataatatcttcatgcttttttttgtagtcatgactgcaatcatggggcgtgagtttggttctatgtacaaggctgaagtgcgtgcaagaaccacaggacaaattgctcctctacctaaatcaggcacactagatactactgaattagaagatcagtttttagcaccaaaagaaggtattaaaattcgtgcttttgatgctattgttcctatttttactttaatcattttagctatattaggattttattttaatggacttagcactttagaaggcgaagaacttgcaaaagcaagtaccaatcctttgtcttttgaaacttttagagctgcttttggaaatgctgattcttctgtggtgttattccaagctgctttgtttgctgctattgtagcgatttttatcggggtgcgtcgtaaaattttcaatcttaaagaagcggtagaaacttggatatatggctggaaaaccatgatttttaccatagtattgcttttatttgcttggtcactttcaagcatagtaaaagatctaggaacttctttatttatcactagtttgcttgcagacaaattgcctgagtttattttgcctgctactatttttgcttttgcttcagccatttcttttgccataggaacaagctatggaactatggggattttaatgcctttagctgtgcctttagctcatgaaatcgccaaaatcaatggtatggatgcaaacgctatgcatcattatatggttattaatataagctgcgttttaacaggtgcgatttttggaaaccattgctcaccaatttcagataatgtaatcctttcatctatgagtgcaaaatgcgatcatatggagcatgtaagaacacaaattccttatgctttatttatctgtggcatttctttaatcgctggatatattcctgtatctttaggacttagcgtttggtttgtcttgcctttaaatttcatacttattgcacttttactaagactcatcggaaagaaagttccatga

SEQ ID NO: 1118 - DNA, 2160 bp, Campylobacter jejuni
atgattaatactcaactagcaagtcaaattgccaatacgcaaaaaaatgatttaaaagtagataactctgcttcaaaagataaaacaaatttaaaagacaatccaaaagaagcacttgcacaagctttaaagcaaaatttaggtttaagcaaggacgctagtagtgaggaaatactagcaaaatttgttcaaaatgaaacaggtaccaaattaaaagaacttgttaataaacttttagatcaaatcaatgctcaaaaaaatcccgattcccctgtacttaaacaaggaaaaaatttaaatttagctcctaattttgctaatgaattaaaaatcttaagtacagaacttgcaaaaagtgatacttttacacaagttttagacagattaaatcaaattttaaaacctgccagtgaaataaaaaacaataacttagctcctttgtttaaaaattcaggcgtatttttagaagctaaattaaaagatgccctaaacgaagaattactacccaaaagttttcactctcttttaagtacaatcaaaggtcttagtagcgaaaaactaagcgttcagatagcccagcttgcaaatacaaatttaagcccaaaagacactttaaaagaattaaaaaatattattaattctagcaaaaatgaaaataagcaaattttaaatcaaagttcttttaaagcacttttaaatttaagttctaaattggaaaattttaaaaattatataagtaaaaatcccagtcatgctcaagaaaaaatcacccctatagctaataaaattttaaaagaattaaattccatcaaaaatgattttttcaaagctcttaataagccagaaaatttaatgataaaagatccaaacatccttaagcaaactgctaccgcctttgaaaaacttgaaaatactttaaaaaatatactaggcaatcaagcttctaaaatacaagataaagaaaatattttagaaaatcttttaagtaacaaagaaaatatgaaagaagaaaaacttaatcataacacaaaaaaccaagatgaagaaaaacatataaaagcatcaaaagaagatgaaaatttagattctggtataaaaacccatgaagaagatacccaagatacaaaaaatgatattcaaaataatgaaacagaaaataagccagacaatgatataaaaaattctactccaaaccaagaaaaaattaaagatgaaaaacaagaaaaatcaaaagaaaatatcaaagaaaatccaaaattttatgaaacaaaaacagaaaacaaaacttcaatcaatacaaataccaacacttcaaatcctaatacaaacaatacgcaaaatttaaataatactcaaaatattcaatctaacaataaccaaactatgcaaaatatttttaaaaatcaggaatttataaaacaaaatattgtaaaaaatttagcatttaatgtagaaaatttagatctagaacaagtgcaagatttaagtaaaaatttaagcaatctttctcgtagacttaatgaaagcttaaaagaacttgaaccctatactcaaaatgccaagcttaatcaagcagaacttaaaaatctcgaacacaaactcaatctttctatcaaagatctagcgcaaattaaaccaaaaacagaacaagatatagctgaatctttacatcatgatgtaaaatcaacacttttgcaaatttcaaatttagctaaaaatgaaggcaatgaagctgtatacaatcaagctaatcgtcttttagcgcaaattgaaatcaatcagcttatgtctttagctaatgattctatcaatacttatctgcctttttcttgggatgatttaaatgattctaaaattatgtttagacgcggaaaaaaggacaaattttttgctcagattaaactcgaatttgcaaaacttggggatttggaaattcttatttctttaaataatgaaaaatatatagatattaatattatggcagaaaatattgaatttagaaaaaccatctatgaaaatgcccatgagcttaaaagaaatatcaataaagcaggacttttaagtgcaaatttctttgtaggtgatatcataagaagtaaatttgatactagaaatatgaaaaatttagatcttgaaatgggtatggataaaaaagtatga

SEQ ID NO: 1119 - DNA, 2253 bp, Campylobacter jejuni
atgagaattacaaataaacttaacttcacaaatagtgtgaataattctatgggcggtcaaagtgctttatatcagatatctcaacaacttgcttcaggtttgaaaatacaaaattcatatgaagatgcaagcacttatatagataatacgcgtcttgaatatgaaattaaaacgttagaacaagtaaaagaatcaacaagtagagctcaagaaatgactcaaaatagtatgaaagctttacaagatatggttaaacttcttgaagattttaaagttaaagtaacccaagctgcaagcgatagcaattctcaaacctcaagagaagctatagcaaaagaactagaacgtataaaagaaagcatagttcagcttgcaaataccagtgttaatggtcagtatctttttgcgggttctcaagttgcaaacaaaccttttgattctaatggaaattattatggagataaaaataatattaatgtagtaactggagctggaactgaaagcccatacaatataccaggttgggatttattttttaaagcagatggagactataaaaaacaaataagcactaatgttagttttacagataatcgttgggatttaaataaagaccctgataaaactaaatatctcacaggagattctaaatggcaacaacttatcggacaaagttatgtaaaagataatagcttagatgctgacaaagactttgagtatgatgatagcaaactagattttcctccaacaactctttatgttcaaggtacaagacccgatggaacaagttttaaaagtgctgtactcgtcaaacccgaagatactttagaagatgtaatggaaaatattggagctctttatggtaatactccaaataataaagtagtagaagtaagtatgaatgatagtggtcaaattcaaattacagatctaaagcaaggtaataataaactcgattttcatgctgtagctttcacaccacaagctgatgataaaactgaattaaataatattatccaagcagcacaggatgaaggcattacaatggaagatgttacaaacagggttatgactgctgcactaggaaatcccaataatggagatattacaaatttaaataatcctgtaaccattcaaattaacggacaaaactttgaaattgatttaaaacaaactgattttatcaaaagtaaaatgacagatacagatggaaatgctgctaatggagctgattacgataatgtgtattttgaaaaaaatggcaatactgtttatggtaatgtttctcaagttatcaaaggaagcaatgcttatgccactgattcaaccaaacttagcgaggtaatggcaggagatagcctaaatggtactactttaaatttaaaagtcaattccaaaggtggaaattcttacgatgttactataaatttacaaacttcaactgtaagctatcctgatcctaataatccaggtcaaaccataagctttcctattatgcatactaatcctgcaactggaaatagtggggttgttacaggatcaaatgatattacttatggtcaaattaatgatattataggtatgtttgctgcagataaaattcctacaacaaccatacaagccaataatggtcaaattaataatgcagattatacccaaatacaacaactcatgaaagattcacaagctactgttgatgtaagtatggattataaaggtcgtattagtgttactgataaactttcatcaggaaccaatatagaaatttctcttagtgattctcaaagtggccaatttccagcacctccttttaccacaacttctactgtacaaaatggtccaaattttagttttagcgcgaataattctttaactatagatgagccaaatgtggatattattaaagatttagattcaatgattgatgctgttttaaaaggcaatatgagagcagactccgaaagtgaaaaccctagaaatacaggtatgcaaggagctttagaaagacttgatcatttagcagatcatgttagcaagcttaatacaactatgggagcatatcataatactatcgaaggtgttaatacacgcacatcatttttaagcgttaatgtccaaagtataaaatcaaatgtgattgatgtagattatggtgaggcaatgatgaatttaatgcaagttcaacttgcatatcaagcttctcttaaagctagtacaacaatttctcaacttagcttattaaattatatgtaa

SEQ ID NO: 1120 - DNA, 2589 bp, Campylobacter jejuni
atgtttttaaatgctttaaaagccgtgtttggcacaaaaaatgatcgtgaagttaagaaatatttcaagcgtgtagcacaaatcaatgctttagaaggcaactatcaaaatttaagcgatgatgaattaaaagctgaatttgcaaaatttaaagagcaaattttaagcggagaaaaaaacgaaaatgatgttttaaatgatgtttttgctatagtcagagagacaggtaagagaactttaaatatgcgtcattttgatgtgcagttaatcggtggtatggttttgcacgatggaaaaatcgcagaaatgaaaacaggagaaggtaaaactcttgtagcgaccttacctgttgttttaaatgccatgagtggcaaaggcgtacatgtcgttacagtaaatgattatctagccaaaagagatgctgagcaaatgagtgcgatttataattttttaggttttagtgttggcgtggtgctttcttctcaaaatagtgatatagaacacaagcaagcttatgattgtgatattacttatggaaccaataatgagtttggttttgattatttgcgtgataatatgaaattttcaaaagctgaaaaagttcaaagagagcataattttgttatcgtagatgaagtagatagtattttaattgatgaggcaagaactccgcttatcatcagtggtcctacaaatcgtactttagatggttatattaaagccaatgaagtagctaaacaaatgcaaaaaggtgaagcagttttaccccctgcaaaacctgagggtgattttgtagtagatgagaaaaatcgtaatattttaattacagaagcaggtattgctaaggctgaaaaactttttggcgtagaaaatttatacagtcttgataatgctatcttagctcatcagcttgatcaagccttaaaagcacataatctttttgaaaaagatgtgcattatgttttaagaaataatgaagttatcattgttgatgaatttacagggcgtttaagcgaaggacgtcgttttagcgaaggattgcatcaagctttagaagctaaagaaaatgtaaaaattcaagaagaaagccaaactctagcagatattacttttcaaaattattttagaatgtacaataaacttgcaggtatgacaggaactgcacaaacagaagcgactgaattttctcaaatttatagtttagatgttatttctataccgacaaatattcctattaaaagacaagataaagatgatcttatctataaaactcaaaatgaaaaattcaaagctgtaattgaagagattaaaaaagccaatgctaaaggtcagcctgtacttgtaggaaccgcaagtatagagcgcagtgaagtttttcacaatatgcttgtaaaagagaaaatccctcatcatgttttaaatgctaaaaatcacgagcaagaagctttgattatccaagatgcaggtaaaaaaggtgctgtaactatcgctacaaatatggcaggtcgtggtgtggatataaaaatcgatgatgagattagggctttgggtgggctttatatcatcggtacagaaagacatgaaagccgccgtattgataatcaacttcgtggtcgtgcaggaaggcagggtgatcctggaataagtcgtttttatctaagtttagaagataatcttttaagaatttttggtggggatcgtattaaaagtattatggatcgtttgggcatagaagagggcgaaagcatagaatcaagaatcgttacaagagcggttgaaaatgcgcaaaaaaaagttgaaagcttgcattttgaaagcagaaagcatttgttagaatacgatgatgtagcaaatgaacaaagaaaaactatttatcgttatcgtaatgagcttttagatgaaaactatgatattagagctaaaatttctcaaaatatcgctgaatatagcgcaaatgtaatgaatgattatatgcttgacgaaagcggttctaatgtaaattttgaaaatttgaaagcaaaaattttgtatgaatgttcaactcagattagtgaaaaagattttgagaatttaagcgtcattgaaatgcaagacaagctaagtcaaattcttgaaaattcttataatgaaaagatgttaagacttgagattaaagaattgcgtaatatagagcgtattttatatttgcaagttttggataatgcttggagagagcatttgtatcaaatggatattttaaaaacaggaataggacttcgtggatacaatcaaaaagatcctcttgtggaatataagaaagaaagttataatcttttcttggagttggtcaatcgtattaaatttgatagtattaaactactttttagcgtgcaatttaatcaagaagaggcgcaaaatttagaaaataaagccaatgaagaaaatgaaaagctacttcaaagctcagtagaaatgggcgcaagcgaagataatcttggcgaagctgaatttaaaaaagttccacgcaatgctccttgtccttgcggaagtggaaaaaaatttaaagaatgccatggaaaaagtggtcctaagcaaggaattttagcttga

SEQ ID NO: 1121 - DNA, 1587 bp, Campylobacter jejuni
gtgaataattcaaataatatttttcagcaaaagcgtatacttttagctgttgtgatttcttttttattttttgttatttatgattattttttcattccaaagcaacctttaaaaatagaacaaaacattacacaaaaaaatcaacaaaacacaagcataaataacactcctaatatacaaaatgccaccacaaatactccaagtgcggctttagtttcgcaagatagtgtgatatctaaggttcaaagcaagcattttgaagcacaaattgactcttttggtagaatttctgctttttatttaaaagatagaaaataccaaaatgagaaaggagaatttataaatcttgttagcaaggaaaatagtccttatcctttagaaatgcgttttagtgatccaagtattaactcagaggcttttaaaattccttatgttgctaacgctagcaatctttttgttgatgaaaatggaagtcaagttttaaaactcactcaaaatctttctggattgaaaatcgaaaaagatattactttttatccaaaaggaaattatgagatagaagttaaactcagcaagaatgcaaattattttataagtccaggatatcgtccaaatattgccgtagatagttatacagttcatggtgctttggtaatggataataaagaaaccatcgaaacttataaagatggagatgtagaaaaggatgaaagtgctaataatgtcgtaatgacttcggcttttgatagatactatgcaactttcttttataattttgataaacctttaaatgtggcaatcagcaaggatgctaatcaaaaccctatagtttttgcttatagtgataatgaatttaaagcagggggctatataggctctaaagaacatgtgattttaagaagtatagatccacgccttgaagcagttgttgaatatggttggtttacttttattgctaagcctatgtttgagtttttgaatttcttgcatcagtatataggaaattggggttgggctatcgttgtgatgactttaattgtgcgtattattttattcccgctaacttataagtctatgatttctatgaataaacttaaagatcttgctcctaaaatgaaagatattagagagcgttataaaggcgatccacaaaaaatgaatatgcacatgatggagctttataaaaaacatggtgcaaatcctatgagtggttgtttgcctatacttttacaaattcctattttctttgctatttatcgcgttttgcttaatgctattgagctaaaagcagctccttgggcgttttggatacatgatttatcggtaatggatccttattttattttgcctattttaatgggtgcaacgatgtttttacaacagcttattacacctatgactatacaagatcctatgcaagctaagattatgaaatttttaccagtgatttttacttttttctttatcactttcccagcaggacttacgctttattggtttgtaaataacctttgttctttggttcaacaatgggttatcaataaaatatttgctaaagaacatcacaaaaaaacaagcggagcatga

SEQ ID NO: 1122 - DNA, 3246 bp, Campylobacter jejuni
atgaaaaatataataaaaagcataggggatttaagagtttcggttgtattgtttttgctttttgcgcttttttgtgctttggcaacttttattgaaagtgcttatggaacccctacggcttgggcaatggtttatgatactttttggtttgaatatatacaacttttacttggtattaatttactatgcgggatgtttcgttataaaatgtttgggcttaaaaaattacctttaatgatttttcatatttcttttttatttattttagtgggttctgcaatgacaagatatgctggttttgaaggtattttacctattagagagcatactcaaaattcacttatagaaagttctaagacttctttgcgtatttctgctataaaagatggagaacgctatagtgcggttaatgatcgttatataggaaatttgccttttgctaattcttttaaactaaaacttaatttaggtgatgatcaagctgtattaaaatataaagatttaatcttaaatgctcattatacttataaagaaaataataattctgatcctttattggttttgatgctttctcaaaaaggatctcaaggtgttgatgttaaatttgaaaaaggtgaagttaagaatatagaaggggttaactttgcttttatgaatgataatgttaaagcaccttttgtaaaaattgatgaaaatttaactttaagttcaagtgaaaacttacattttctaagcatgctagatggacaaaatttagaccttaaaattggagaaaaggcaaatgctaaggaaagaagactttatgaaattaatgatattagttttgtagttaaagctgcttctttgcatgcgcaagaagctttagaaggttccaatagacctcaagatgaaagtttttggttatggtttaaatctgcttggttagaagtgggtagaactatgttgatttctacttttggcgagcctcaaaattggaaaaattctttattattgcattttaaagattttgccttaagcaatgagaataaaaacttagaattaactggctctaatgctttaaaattagaattaagctataaaaatgaaagtaaagaattttatatttttgaatataataaacctattatgatagaacttgcagatcaaaaattctttatttcttgggcgctttcttatgaacaattgccttttgatatttatttaagagattttgtattagatcgttatccaggttctatgtctccagcttcttatgcaagtgaaattaccgtaaaaaataataatgaaaattttgattatagaatttttatgaataatgttttagattatgatggctatagattttatcaaagttcttatgatcaagatgaaaaagggactgttttatctgtaaataaagatccgggcaaaataccaacttatataggttattttctgctttgtcttggaatgtttatgaattttttaaatccacattctagatttagaactttggcaagattaattaataaagacactttaaaacatacaagtgtgattatttttattttattgttatcttttggttctgaaaagacttttgctcaagatttaaattcgaccttacctgtggtaaatactaatcatgctaaagctcttgccactttaatagttcaaaaatcagcagatggaagaatggtgccttttgatacgctatcaagagaaattttagaaaaaattcatcaaagtgatagctataagggtcaaaattctaacgctgttatgctttccatgctcgttgatgtagataaatggcaattggaaccttttattttaatgccacaaaatcaagcagttcgtgatgctattgcaaatattttagaaattcctagtgctaaatatattgcttataaagatttttttgatgagaataaccgctataaacttcaaaaatatgttgaaaatgcaaatcgtaaaaacccaaatgcaagaggagtttttgataaggaaattataaaactagatgaaagagctaatgttgtaaatttagtttttagtggtgaattatttaaatttattcctgttcaaaataatccaaataatgtttggcttgcacctttttctgctgtaactactcttaagggggatgaagggcatattgttttggctttaatacagaattattttagtgccgtggaaaatgcttttaaagatggtaattggattagagctgatgaaggcttgaaatttatcaaagaatatcaagaaaaaataggatataaagtcatgcctagtaaaaccaaggttgaaatggaaattttttctaataaggctgaaattttcgttaaactcgctcctgtatatttaattgcgggttttttactcttgattcttgttttttctaaaatggtcgtaccgaatttaaaaatctcttttatatttaaagtggtatatgttttaaatgttttagcttttgtaattcatacagtaggtcttggacttcgtgcttatttatcaggtcatgctccatggagtaatggctatgaaagtatggtgtatatagcttgggcattgtctttgtcgggtatatttttctccagaaaaagtcctatagccttgtcattaacttctattttatctggtgttgtattaatggttgcgcatttaagcgaaatgaatccgcaaattacaaatcttgttcctgtgcttaattcttattggcttagtattcatgtatctgttattactgctagttatggatttttaggactttgtgccttacttggtatctttacattgttcttaatgtgttttcttaagaaagatggaaaatataatcttaatattttgagaaatattacagaggctacaagaattaatgaaatggcaatgatttttggactttgtttgcttactgtaggaaattttttaggagcaatttgggcaaatgaaagttgggggagatattggagttgggattctaaggaaacttgggctttagttagcattttggtttatgcagcaattttgcatcttagaatgattccaaaatattgtaatcaatttgtgtttgctttatggagtatgtttgcttattgggttattattatgacttattttggagtaaattactttttaacaggacttcattcttacgctgcaggcgaagcggctcaaattcctaattatgtttattggggatttgcattgatggtggttttagctttttttgcaagaaggaagcgaaattttgtgggcaaactttaa

SEQ ID NO: 1123 - DNA, 1275 bp, Campylobacter jejuni
atgtttgaaaaatatttaaaatcagctatatttttagctctttatcccttagcaatgttagcttctaatttgcacgaatttatagcactaagtcaaaataatgaatcctatctcattaagcaaatgcaaagcgaacaagcaaatttagacaaagaacaagcttttagaaattacctaccctctcttagtctaaactcagcttatgtagccaacaataaagatcgcttcattatcgatccacaagaaagtttatttgctaaagtttctcttaattttttgctttttgatgggggtgctagagaggctaatttaagagctttagaaagcagagaaaaattaagccttttagacaaagaacaaaataaaaattaccttgccctaaatgcaatcacactttattttaacaccttaagtcttgaaaaaattttactagccaatcaacaaaaagtatcttttttaaaatcaacttttgaaagattgcaaaaattttacgacgcaggacttagccctaaagatgaacttgaaagcattaaggctaaataccatttaagcttattagagctcagtcaaaatgaattaaaacttgccaatatacaaaaagagattaaaattttaagcgatacagattttaaagtgcaagggaatgcttttttagaaaatccgcaacaagaaaaaagtcaaaactatgaagtaatgatagctaaagaacaaatcaatcttgctaaagaaagtgtaaatttagcaaaagctgaatattttccaaaattttatattcaagataattttaacttttataaaaacaattataatccaaaagttccagctccttttgcaaatttagcggatcaattcttagaaaaatattctcaaggtaatcaatttattttaggtatggaatggaaaatttttgatttcaatgcaagggctaaagaagttgaaaaagagcgtttaaatgttcaaatagccaatgcaaatgcaagatttagcgagagaaaaaataaagaagaattaaattatttagacaaaagtttaaaagttttacaagaacaaattttagctcttaatcttagcttaaatgctgcaaatttagcttttgaaagtgtagataaaaaataccaagcaggacttgtttcttatgtagaatatcttcaagctttagaggttaaatttaaagcacaaagcgatttagagcttgctaaaaatgaatttgaaattactaaagcaaattattattttaatgcgggtatagatcttaattcaaaggttaaagaatga

SEQ ID NO: 1124 - DNA, 741 bp, Campylobacter jejuni
atgaaaaaaattctatttttacttcttgtttttaattgcgcctttggcgaagaaatttacgcaagtttcaatgtagaagcatcaaaacaaagcaaacttgcccttgaaagcataggtttggttcaaaaaattcctgtagaaattggacaaaaagtcagcaaaggagaacttttacttgctcttgatcaagaaagtgaaaaaatagctcttcaaaatgctcaaaattcttatcaacttgcccttgtagaatacgaaaataccaaaagtaggatgcaaaaaatcaaagctgtagaaaatgttatagacaaacaaagctatgaagatatgaaagctaagtttgatgctgctaatttaaatttaaacaaagcaaaaatcaatatagcttattataaaaatatcatggcaaaaaaagaattacgcgcaccttatgatgctattatcgcaaacaaatttatacaagtgggcgaaggagtaggaggagtagctcaacctttaatagaaattttttcctatccacaaagcaaactgattttaagttttgatgaaaaatataaagataaagttagattaggcgatgatttcttttataaaatcgatcaaaatggtacagaattgaaaggaaaaatcaaccttatttatccaagtatagaagtaaaaacaagaaaaatttatgctgaagtgcaaaccacaaatctaacaccagggctttttggtgaaggtagaatcatcactaaagattaa

SEQ ID NO: 1125 - DNA, 3018 bp, Campylobacter jejuni
atgtttaaactagctataaaccgacctattaccgtgctaatgtttttcttagctcttatgatttttgggctaatctctgcttttagcatgagtgtaaatttatttcctaatgtttccatacctcttataaaaatcacaagcaagataaatggggatttaaatttcgtagaatcaaaagtcactaaagaaatagaaaatgctttaagtgaaatcgatggagtaaagaccataacctcagctgcatatgataattttagtgtaagtgtagtcgagtttaaactgggtaaaaatcttgaagtagctgccaatgatgtgcgtgataaaataggaactttaagcctaccttctaagcctgaaattgaaaaaatcagttcagattctggttctgctatttcactttttctatattctaaagataaattacaactcatgcgtgaaatcaatgacaaaataaaaccttttttgcaaagagttgaaggagtaggtaaaatcgaagctaaggggtttttagaaccccaaattcgcatagaattaaaaccaaaccaacttagaaaatacaatcttaacgcccttgatgtagcaaatatcatcaaaagtcaaaattttaaacaagccctaggcgaacttaacaacaatcaagataactatatcatcaaaggctattttgaagccacaaatttagaagaacttagcaatcttcgcataaaaacaggagtatttttaagtgatattgctaatatttcaagcctttatgaagatgaaaaacaaagtgctttatacgaaggtaaagaaggggtgcttttagaactcggaaaaatcacaaattataacacccttgaaatgattaaaaatgtcaaaaatgccttgcctattttagaaaaacaaattccaaaagatataagcattaatatgctttatgataaaagcttaaatatccacaagcacctttctcaagtgatttttgatatggttttggggatttttctaacccttgttatcgtgtttttatttttaagaaatttaagtacaactctcattgcttgcatagctatacctacttctatcatttcaactttttttattatcgatcttttaggctatgatttaaaccgcttaacttttatagctttaaccttaagcataggaatttttatcgatgatgctatagtagtgattgaaaatattgctaaaaaactaaaaacttatccgcctttacaagctgcttttttaggtatcaatgaaataggttttagcgttttaagcataagtatagttttactttgtgtttttatccctatttcttatatgaactctatatcagggctttttttcaatgccttaggcataagcgttgcaagtgggatagttataagctttttggtttctgtatttttaatacctagtattggggcaagatttttaaatccaaaagaaaacaagttttatgaaaaaacagaagctttttttgaaaaaatagagcaaaagtatgaaaatttactctataaaattttacaaaataaagtaaaatttatcctagccactcttgtttttatagggctttcttttgctttagccactcgcatagggcttgattttttacctatggaagatgatagtgaaattcaagttttgcttgaaagcaaaaaggatttaagtttagaagccatgaaagaaaaaagtttaaatttgcttgaaaaaatcaaaaatgatagcaatgtcaaatacgcttttttacttgtaggctatgatgatgccaaagatgctacaaaggctaaaatttatgttaaacttaaaaatttagacgaaagaaatttaagacaaagtgccatagtaagtttatatcgtcaaaaatttcaagatgaaagtttaaaaatcaaaattttagaacttccaaagatagagggtgcaggcattgatgatcccgtgcaatttttaatcttaggagatgatttaaacactctgaaagaagctgcttctcaggcaaaagaaattttaggcactaatgcacgcattgtagatataagtgataatgctaatgctacaaaagatgaagtagccttacacatcaacaaagaaaaagccaaacttttagatgtcaatcctcaatatatcgctggggttttagggtattctttctcgcaacttagcgtaggaagcatggatagaggcaattcaaaagatgatattatcctaagttttgctccagaatttaaaaaagacatagaagctttaaagcgcattagcattaaaaacaaccaaggtataaatttagaactttcaagcgtggtggattttatatacagtaaagatttaaaaactatcaatcgttacaataaaaaccgctctgtgaaaatcacagctggagtgaatgatctttccttaggagcggtgcaaaaacttttactagataatatggataaaattttaaataacaatccaagtcttagctatgctttttcaggctttatcaatcttttaggtgaaaccgtgcaaggttttgctatggcagtagcacttgcttttgttttaatttatcttgttttagccgcactttatgaaagttttattctgcctttaatcatcatgataaccatgcctttagcctttggcggagcttctatagggctttttatcacagggcataatttttcactttttgtacttattgccatcatcttactttttggtatggtggggaaaaatgctattttactcgtagatgtagctaataaaaaatgccatgaaggtttagatcccgataaagctcttttaatcgctggaaaatcgcgcttaagggctatattgatgacaacttttgctatgatttttgctatgctcccacttgctctttcaaggggtgcgggctatgaagctaattctcctatggcaatagccattatctttggacttataagttcgactttgcttaccttactcgtagtacctgcactttttaaattttgttttaaactagatagcaaattaagaaaaatttatgagagagaaaaattaaattaa

SEQ ID NO: 1126 - DNA, 1098 bp, Campylobacter jejuni
atgaatgcaaaagaatttttaatcgaacttttaaaatttaaatctgttacgccaaatgatgatggagctttaaatttcatcgctatggaactgagtgattttgaagctttttttatagaaaaagaaggcattaaaaaccttttactcactaaaaaatttaaagatgaaggcgagcatttagcttttggtgggcatgtagatgtggtgcctgcaggcgagggttggagtaataatgcttttgcgcctgtggaaaaagaaggctttatctatgcaaggggtgctcaagatatgaaaagcggagtagcagcctttgtggatgcggcaaagaatgcggattttaaaggagcaagactgagtcttattttaacaagtgatgaagaaggcgaggctatatatggaaccaaggctgttttagaatggatgcaagaaagagatatgttacctgattatgccgtggttgcagagccaacctgtgttaaaaaaatcggcgatagtattaaaatagggcgtcgtggttctatcaatggaaaacttttaatccgtggaaaacaagggcatgttgcttatcctgaaaaatgtatcaatcctgtgcatgattttgcaccggttttaaagcttttagcgggttttgatcttgatcctggaagtgctgaatttagtccttcaaaaatcgttataactgatattcgtggaggtatgggggtatgtaatgtaacgccaaatgatttaaaacttatgtttaatgtacgcaattcccctgatacaagcttagaagatgtaaaaagttatgtagaaaaaatttgtcatggtttaaactatgagttagagctaaaacaatcaagcgaagcttttttgacaaatatcgataataaaatcgttcaaaaaatgaatgaaagcgttcaaaaaatcactcatgaagtgccagagcttaataccaaaggcggtacaagtgatgcaaggtattttgcaaaatacggtgtaaaggtagtagaatttggggtttgtaatgatagaattcacgctattgatgaaagagtaagcatagaagaatttgaaaaactttgccttgtttttaaagacttgatagaaaatttttaa

SEQ ID NO: 1127 - DNA, 2754 bp, Campylobacter jejuni
atggactacaaagaaactctacttttgcccagcactacttttgctatgcgggcgaatttagcggaacttgaaccgcaaagatttaaaaaatggtttgagcaaaattatgcttatgaaaaaatgaaagaaaatcgcaaaaatgcgaaaaaaagttttaccttgcacgatggccccccttatgctaacggacatattcatataggacatgctttaaataaaattttaaaagaaactattatcaaaacgcattattttaaaggtgagagtgtgcgttttactccagggtgggattgtcatggtttacctatagaacaacaagtagaagtaaagcttggagaaaagaaaaaaagcttaagcaagaaagaaattcgtgagttttgcagacaacatgcgagtgaatttgtagatatccaaagagaagaatttaaagatttaggcattattgcggattgggataagccttatttgactatgaaatttgagtttgaagcagcgatttatagaactttatgtgagattgctaaaaaaggcttactttgtgagcgttctaaacctgttttttggagttgggcggcaaagtcagctttagcggaagctgaagtagagtatcaagataaagaagattattctatctttgtggcttttgatttagatgtaaaagcttgcgaaaaattaggtgtttcaaaagcaagcgcagtgatatggacaactacgccttggactttggtggctaatcaagctatagccttaaatcctaacgaaaattatgtgatcactaaagaaggtttgatttttgcaagtgctttgcttaaaagcatggtagaaaaaggacttacaagtggagaaattcaaaaagaactcaacgcaaaagaatttgaaaaacttgaagctatcaatcctttaaatggaagaaaatctgttttaatcatgggtgagcatgtattgatggatggtggaagtggacttgtacatactgcaccaggacatggcgaagatgattactatgcttgtttgaaatacggtattgaagttttaatgcctgttgatgatagtggatgttatgatgaaactttaagagctaaagggcttttgccttctcatttgcttgaagagtttataggtcttcatatttttaaggccaatgaaaaaattttagaacttttaggcgaaaaacttttacattcttctaaatttatacactcttatccattttgttggagaacgcataagcctgtgatttatagagctactaaacaatggtttattttaatggatgaaccaaaacttcaaggaaaaactttaagagagtgtgcaaaagaacaacttttaaaaacaaccttttatccgcaaagtggggtaaaaagaataggttctatggtggaaaatcgcccagattggtgtatttcaagacaaagggactggggaacgcctatagccttttttagagataaaaacactaaagaagtgatttttgatgatgaactttttgactttgtagcagctatttttgaaaaacacggtgctgatgcgtggtgggagtttgaaatcaaagatttaattcctacaaattcaaaatacaaagctgaaaatttagaaaaagtatatgatattttagatgtttggtttgatagcggaagtacttttaatgcagttttaaatagcggactttatgacgcaggagaaaaaagagcaagtatgtatttagaaggaagcgatcagcatcggggttggtttcaaagctctttgcttgtaggtacagcgatcaatgaaagcgcaccttatgaaagcattttaactcatggttttaccaccgatgaaaaagggcaaaaaatgtctaaatctaaaggcaacgtgatcgcttctgaatatgtagcaaaaacctatggagttgaaattttaagactttggatacttttaagtgattattcaagtgatttaaaaatttcagacaatatcttaaaacaagtgggcgaacaataccgcaaaataagaaacactataagatttttacttgctaataccaatgatttaaaagatttagaagttaaagaatttagttttattgataaatggatattaagtcgtgcaaccaaagtttttaaagcaagtaaagaagcattttttgcttatgaatttgccaaaggttttagtttgcttttaaattttttaagtgcggatttaagtgggatttatcttgatatcagtaaagataggctttattgcgatagtgaaaatgcccaaagaagaaaatctgctcaagtggctatggctttgatggcaaaagagcttttaaatttacttgctccaaatttaagctatagtgtagatgaggctctagaacatgctaatgttttaatcaaaggcgatgcaaaagatgtatttgatctgagtttaactcaagattttgattatgattttggtatagatgatacatttttaatgagcgctagagagaaattttttgaacaaattgatatacttaaaaaagataaaatcattaaatctactttggaattaaatttaaacatcagttttaataaattcccaaatgaggaattagccgattggtttatggtaagtcaaatcagcaatgaaaatgaagaaattttggctgaatttgaagtagagaatgagaaatttaaaatcaccaaagcttcactttgtaaatgcccaagatgttggaaacttcaaagtaaaaatgaagaaacaccttgtttaagatgtgaagaagttttaaaaggagttcaatgctag

SEQ ID NO: 1128 - DNA, 2376 bp, Campylobacter jejuni
atgcagattgaagagatacaaaattatccagcaaatttaccagtattggttgaagatgaattatttttatatccttttatgataactcctatttttattaacgattcatccaatatgaaagctttagatcttgcgattaaaaatgatagcatgctttttgttgcaccttcaaagttggaaaatggaagaaattttgatgaaatttataattgcggagtgattgggactatcatgcgaaaagttcctttacctgatggaagggtgaaaatactttttcaaggatatgctaagggtaaaattatagagcaaatttctaataaacctttagaagccaagatagaacttataaaagaagactttttagaaggaactaaaaaagaagcgcttcttgaagttttaaaagagaaggtaaaaaatttggcaaatattagtcattatttttctccagatcttttaagaacaattgaagaaggttttgatgcgtctaggatttgtgatttgattttaaatactgtgcgtattaaaaaacaagttgcttatgagttttttgttttaacagatcttgagcaaaaattagtaaaattaatagatttaattgcccaagaaatagaagccaataaaattcaaaaagaaattaaaaataaagtacattctcgtattgataaggtaaataaagaatattttttaaaagaacaattaagacaaattcaaaaagagcttggttctgacacacaaaaagaagatgaggttagagagtatcaaaagcgtctggagctaaagaagaaatttatgcacgaagacgcttataaagaaatcaaaaaacaaattgaaaaattcgaacgcattcatcaagataattccgaagcatcgatgattcaaacttacatagaaacagcattagatattccttttgaaaaaatttctaagaaaaaacttgatattaaagaagtttcaaaacagctcaaccatgatcattatgcattaaataaaccaaaagaacgcatagaagaatattttgcagttagggaacttttagaaaaaagaaaaatagcagaaaaagatggtgctaaagttatactttgtctttatggacctcctggcgtgggtaaaacttcactggcaaattctgtttcaaaagctttaaaaagagagcttattcgcatagccttaggcggacttgaagatgttaatgagctacgtggtcatcgtagaacttatataggcgctatgcctggacgtattacccaaggactcatagaggcaaaacaaattaatcctgtaattgtattggatgaaattgataaattaaatcgcagttttagaggcgatccaagtgcggtgcttttagaaattttagatccagagcaaaattctaaatttagggattattatttaaattttaatattgatttaagtaaagtcatttttatagcaacggcaaatgatattagcaatattcctgcacctttaagagatagaatggaatttatagaacttagctcttatactccaagtgaaaaatttcatataatgaaaaaatatttaattccagatgagcttaaaaaacatggcttaaaatccaatgaattatctattgatgatgaaactatagagttaatcattagtgattatactcgtgaatcaggagtcagaaatttgcgtcgcaaagtggcagagttgtgtcgtaagagtgctaaaaaactacttttagaaaatattaaaaaagtcattattaatacaaaaaatttgaatgaatttttagataaaaaagtttttgaaatagaaaaaaataatggagaaaatcaagtaggtcaggttaatggtttggcttggacaagtgtaggtggagatgttttaaaagtagaggctgtaaaaattaaaggtaaaggagaattaacgctcacgggaagtttgggtgatgtaatgaaagaatcagctagaattgcttttagcatgataaaagttttaatcgatgaaggaaaaataaaaatacctaaaaaaataattattgatcctaaagttaatgtttatgatagttataatattcatatacatgtgccagatggagctactccaaaagatggcccaagtgcaggtattacgataagcacagctattgcttctatttttagtgataaaaaggttaaagcagatgttgcaatgacgggtgaaatagatttaaaaggaaaagttttaccaataggcggattaaaagaaaaattaattgcagcttataaagcagatataaaaacagctttaatcccaagaaaaaattacgaaagagatttaaaagatattcctagtgaggttagagacaatatggaaatcattgctgttgatactttcagtgatgttttagaatatactttggtttaa

SEQ ID NO: 1129 - DNA, 732 bp, Campylobacter jejuni
atgctctatatacttgcaaatggatctatggcaacagccttagcctatgggttaaaagatgattatgaaatttgtatagtaggaagaagtatagaaaaacttcaagccctcgccaaagaaggctttaaaaccttactttacaaagattttaacatagaaggtaaagatgttattttagcatttaaaccttatgctttagaaaatattgctcaaatgctaaaaggacaagcacgtatcttaatctctgttttagccaatgttgattttgaaaaactacaaaccatcaaagctcaaaattatgttagaataatacccaatacagcagctaaatacaaggcttcaaccacaccatatatacttaaaaactctcattttgaaaatgaaattttagacattttaaaaacttttggctcggcttataaattagataatgaaatacaaatgaatgcagctatggcgattagcggctgcgctcctgcttttttagcacttatagcagaaagcattgctaatgctggagtttatgaaggtttgtcaaaagaacttagtctcaatcttacgcgctctttatttaaaagctctaatgctttactagaacatgaacatccagctattatcaaagaaaatatttgctcccctggcggagttacaataaaaggcataaaaatactcgaacaaaaaggaattcgcggaagtttttttgaagccataaatgctagcagcgctaaatga

SEQ ID NO: 1130 - DNA, 2142 bp, Campylobacter jejuni
atgttgaaaaaagagtatttaaaaaacccttatttagttttgtttgcgatgattgtattagcttatgtttttagtgtattttgcaggttttattgggtttggtgggcaagtgagtttaacgagtattttttcaataatcaattaatgatcatttcaaacgatggctatgcttttgctgagggcgcaagagatatgatagcaggttttcatcagcctaatgatttgagttattatggatcttctttatctacgcttacttattggctttataaaatcacacctttttcttttgaaagtatcattttatatatgagtacttttttatcttctttggtggtgattcctattattttactagctaatgaatacaaacgccctttaatgggctttgtagctgctcttttagcaagtgtagcaaacagttattataatcgcactatgagtgggtattatgatacggatatgctggtaattgttttacctatgtttattttattttttatggtaagaatgattttaaaaaaagactttttttcattgattgccttgccattatttataggaatttatctttggtggtatccttcaagttatactttaaatgtagctttaattggactttttttaatttatacacttatttttcatagaaaagaaaagattttttatatagctgtgattttgtcttctcttactctttcaaatatagcatggttttatcaaagtgccattatagtaatactttttgctttatttgctttagagcaaaaacgcttaaattttatgattataggaattttaggtagtgcaactttgatatttttgattttaagtggtggggttgatcccatactttatcagcttaaattttatatttttagaagcgatgaaagtgcgaatttaacacagggctttatgtattttaatgttaatcaaaccatacaagaagttgaaaatgtagattttagcgaatttatgcgaagaattagtggtagtgaaattgttttcttgttttctttgtttggttttgtatggcttttgagaaaacataaaagtatgattatggctttacctatattggtgcttgggtttttagccttaaaaggaggacttagatttaccatttattctgtacctgtaatggctttaggatttggttttttattgagcgagtttaaggctatattggttaaaaaatatagccaattaacttcaaatgtttgtattgtttttgcaactattttgactttggctccagtatttatccatatttacaactataaagcgccaacagttttttctcaaaatgaagcatcattattaaatcaattaaaaaatatagccaatagagaagattatgtggtaacttggtgggattatggttatcctgtgcgttattatagcgatgtgaaaactttagtagatggtggaaagcatttaggtaaggataattttttcccttctttttctttaagtaaagatgaacaagctgcagctaatatggcaagacttagtgtagaatatacagaaaaaagcttttatgctccgcaaaatgatattttaaaatcagacattttacaagccatgatgaaagattataatcaaagcaatgtggatttatttctagcttcattatcaaaacctgattttaaaatcgatacaccaaaaactcgtgatatttatctttatatgcccgctagaatgtctttgattttttctacggtggctagtttttcttttattaatttagatacaggagttttggataaaccttttacctttagcacagcttatccacttgatgttaaaaatggagaaatttatcttagcaacggagtggttttaagcgatgattttagaagttttaaaataggtgataatgtggtttctgtaaatagtatcgtagagattaattctattaaacaaggtgaatacaaaatcactccaatcgatgataaggctcagttttatattttttatttaaaggatagtgctattccttacgcacaatttattttaatggataaaaccatgtttaatagtgcttatgtgcaaatgttttttttgggaaattatgataagaatttatttgacttggtgattaattctagagatgctaaagtttttaaacttaaaatttaa

SEQ ID NO: 1131 - DNA, 2358 bp, Campylobacter jejuni
atgattatgaaatgtgaacattgcaaacttgattataaacaagcccaaatgatagagtataagggtaaatttttttgttgtaaaggttgtgagagcgtttgggaaattttgcatgaaagtggattagatgagttttatgaaaagcttggaaatcaaactttaagccctgtaaattttcaaaatgaaatgaaaaattatgatgagtttatcactaaaaccaaagaaggatttagtgaaatttatctcatgatacacggtatagaatgtgcagcttgtgtgtggcttaatgagaaaattttaaccaaacaagaaggaattttagaacttgatattaatcatttaaaccataaagcacgcattgtttttgatgagcaaagcatttctttggtgcaaattttaagacttattgaaagcataggctataaagcgagtgcttatgatgcgagcaaggcttcaaaaaaagcggatttactaaaaagggaattttattctaagcttgttgtggctatagcttgtgtgatgaatatcatgtggatagcagtggcaaaatacgcaggattttttagcggtatggataaggacactaaggatattttaaattttgctgaatttatcctttgttctcctgtgcttttttatacgggatctcatttttataaaagtgcttttaaaactttaaaaatgcatagtttaaatatggatgtattggtgattagcggagcgagtttggcttatgtttattctttatgggccatgttttttagggtaggggaggtgtattttgactctgtggcgatgataatttgctttgtttttataggtaaatatcttgagatgtttagcaaaaagcgtgctttagatactatagatgggcttaatgattttttgcaaaatgaagttttagttttcaatggtaaagaatttgtctctaaagaagtgcaaaaggtttgtttgggggatagaattttgcttaaaactggagataaaattttaatcgatgggatttgtaaaagtggtgaaatgagcgtagatacttcttctttaaatggagaaaataccccaaaactcatacaaaaagaagatgaaattttttcagcttgtatagtgcttgatggaagtgtggagtatgaagcaacaaagttttacaaggattcaaaactcagtcaaattatccagcttttagaacttgcaagttctaaaaaagcaaaacttgaaagtttggtcaatagtcttttggcttatttttctagaacggttttattgatcgcttttatttgttttgctttttggtttttttataaagaagagagtttcgaaatttctttagtcaatgcgattgcagttttgattatcgcttgtccttgtgctttggctttagcaacgccagtgagcaatcttgtggctttaggtagggctttaaaaaagcatattttatttaaaagttctagcgtgatagaagatttaagcaaatgtgattgtgtggtgtttgataaaacgggtattttaaccaaaatagagcttgaacttaaagaggtttttttagataaagcgcttgatttaaacgagctttataattttgtaaaactttctaaacatcctatctctcaaaatattgtgttatatttaaagcaaaaaggagctaaggatttaaatttggattttaaaaagcattcgagtattcaagctaaaggtttaagtgctgagttaaatgaagggttgcttttaggcggaagttctaaatttttgcaagaaaagggtattgtggctaaagaatttgataatacgcattttatttttgccaaggaaggtaaaattttagctttttttgagtttgatagtgttttaagagaaggtgcaaaagagcttatcgcttatcttaaaaaagaaaagaaagaattaatgatactcagtggcgatcatcaaaaagcagtggaaaaaatcgctaaaaagttagaaattcaaaattatcaagcttcttgtttgcctgaagataagatgaaaactatagaaaatttaagtaaaaattacaaagttttatttgtaggtgatggggtaaatgatgcactagctttaaaatacgcaagtgtttcaatgactttaagagaaggaagtgatctagctatagaaagtagtgatgttttgcttttgaaaaatgacttgctttctttaaaaaaagccatcaaattatctaaaaacacctttaaaattatcaagcaaaatcttgctttttctttgttttataatgcttgcaccatacctttggcttttttgggtatgataaatcctttatttgctgctatttctatgtcttttagtagtataatagtcgttttaaatgctttaaggattaaagaatga

SEQ ID NO: 1132 - DNA, 1125 bp, Campylobacter jejuni
atgagagaaataaaaatatttttagttgtagtagtttttactgcacttgtatattggggggtagagccttatgctcattcagtgatgaagcctcatgttgctcctgcaaattttgattttgctgttgaagatactacttttgcaaaaggtatagttgaagctaaagaattagctctaaaagatgcacaagcttcaggagatgctaaaagaatagagagtgcaaacaaagaacttgaaaaagcaaaagaagaattaagcaaggttgaaacactttgggtagatgttgcaaagatcgattttgctaagggtgatgcaaaaaaaggtaaagaattttttgaaaataactgttttgcatgtcatggtgtaaaagaagatggaatagcagctaatattactgattcttctatgggagtaataccacctgatcttagtgcagctggtgctatttttgatgaaaaatttttagcagctttgattatgcatcctgcgcttgctttaaaagtagatcataaatttggtgatgcttttattatgacagcttataataaagatacttcaggagaaagtgaagaagctacaaatgcaaatatagccaatgtaattgcttatcttaaagatgtgagtgttaaatttgaagccaatgaagatgctactattaagaaagatgttgaggcaaaatatgctaaaatggaaaatagtgctcaaaaagcggctttaatggaaaaagatataaaatttgctaaagataaagcaacttttattgaggcttgcggacgttgtcatgatatgaaatacgatagcttttttactccatcaaatcaaaatgatttaaaaacttatttaggttctgttccgcctgatctttctatgatgataagatctcgtggtgagcaatatttacatgattttattaataatactcaaaaacttcttccaggaaccgctatgccaagagtaggtttaacagaagctgcacaggctaaggttgtatcttatattgatcaagtgggtgatagcaaaaaagaagaaagaaaaactacaggaatttatgtaatgatattctttgtaattttaagtatttttgctataggttggaagcgttctgtttggtctaaattacattaa

SEQ ID NO: 1133 - DNA, 894 bp, Campylobacter jejuni
atgaatagtttatacgaaactcttggagttagcaaaaacgctagtgcagatgaaataaaaaaagcttaccgtcgcctagctagaaaatatcatcctgatatcaacaaagaaaaaggtgctgaagaaaaatttaaagaaattaatgctgcttatgaaattttaagtgacgaaaaaaaacgagctcagtatgaccaatacggcgattctatgtttggtggacaaagttttcatgatttttcaagaaatactggtggggtaaatttggacgatattttaaaagatctctttggaggaggctttggtggacgctcaagagggggttttaacggcttttcttcaaaaggctttagcagtggttttggaggatttggaggttttgaagaagaaattttagacagcaatctagagcttcacattcctttcgaaaaagctgttaaaggcggggaacatagttttaattttcaaggcgaaaccattaaatttaaaattccacatggtataaaagaaggcgagaaactaagaattcgctctaaaggaaaacaaagcagaaatggagctagaggagatttaatcattattgtaaaaatagaagaaagtcctatttacacaagagaagatgatgatttatatcaaaaggttgatatttctttaaaaactgcactttttggtggaaaaataaatataaaaacactcaaagaaggcaaggaagaagcaataattaacataacgcctaattcaaaaaataaccaaaaaattcgtttaaaaggctatggtgtgcaaaatagaaaaagtgatatttatggggatatgtatttgattttaaatgttgttttgccaaatttagatacccttgatgaaaaatttatagaactcttaaaagaaaaattaccttaa

SEQ ID NO: 1134 - DNA, 621 bp, Campylobacter jejuni
atgattaatgtattttttgatatggatggaactttaatcgatagcgcaaatgccatttcttgtgcagtcaatgaaataagacaggatttaaacctagccccactttcaagagaaatcattatgcaaaccatcaatactcctaatattgactgggcaaaagaactttataatatagaaaatttccatcattctagttttaaagaaggctacgaaaaatattttgtcaaacactatgaacaaagcgtggtgctttttgaaggggtgaaagaactgttagaatttttaaaaagcaaaaattgttttttagctattgctactaacgccccgcaaagctcactttcaaacatacttaaaaaacacgatatcattccttattttgataaaattttaggcgtaagtttaggcatagaacccaaacctcatcctatgatgctagagcttttaaaaagcgaggctccatataaaacaagcgtttttataggagatagtcaaaaagataaagaatgtgctaaaaatgctaatttgccttattttcatgccaaatggtatcaaaaaaatttaaaagaaaatgaatttagcaacgctagtgaacttaaaggctttttgcaaaagtatttataa

SEQ ID NO: 1135 - DNA, 951 bp, Campylobacter jejuni
atgaaatttagtgactttttccatgcttggctccatgaaagctattataaaaatgctgtaagtataggaaaaaacggagatttttttactgctgtgagcgtaggaaatctttttggcacacttttagccaagcattttttaaatttaatagatgaaaaaattctcaaacctccactagaacttgtagaaataggcgctaatgaaggctatttaagtcgtgattttttagccgctttgcttgaattaagacctgaaattttttctcaaatttcttttttcatcatagaaccacatgaaaaattaagaactttacaaaaaaagactttagaaggagtggaatttactcacaaaaatagtcttaaagaatgccattttaagaacgcttttttcttttgcaatgaactttttgatagttttacctgcgaacttatagatcatgataaaatggcatttgtagaaaattttaaacttatttttaaaaatatggatgaaaatttgatcacaaaatgcaaagctttaaatcttacaaaaggcgaactcagtttagagcttgaaaatttttttaaagatttaaaccaaacttgtgagagatttatatttgcgggatttgactatggaactttaaatccacaaagttttagcttaagaatctatcaaaagcacgaagtttttagcccttttgaagtatctttaaaagattttttcggcaaaagcgatctaacttataatgtcaattttactcatcttcaaaaactcatcaaagaatatgattttaaacctttagcttttaaaaaacaaagtcttgctttcatggattttggttttgaagatttattagaatacgcaaaaaataaaaacattaaaacttacgaaagttttttatctcaagctaaaattttattttttaattttgatgaaaaatttcattttttcgaatttcaaaaaaactaa

SEQ ID NO: 1136 - DNA, 1236 bp, Campylobacter jejuni
atgacaaaaaattattctattcataccaaactgattattttatttgttgttacttttttcttggtttgtgtgctttttatcgttcttttaaaaatagaagggaatacctataatgaagaagaaagtttaaaacaagaaaatcttataaaaaatttactcatctcctatgaaaacacttcaggtgttgaaataggagcttatcttggaaacagcggttttaacgctatacaaaatcccaatcttgtaaaagctataagaaataatggacaatcactttttaaagcaggcggagagctttgtactctttcttctttaaaatatcatagcaatctttattttgatgttcaatgtaaagattttgatggcttgtatgaagaaaatactagtgatagggtttataatcttttattgataggatttttctctttttctttgttggttgtttttatgtatttttctgtattaaaatccttagaacctttaaaaaaattaagaagacaagttgccgaagttgcaaatggggaacaacctgattttctagactatcaagaagatgaagtaggcaagatcgcctttgaatttcaaaaagctttcaagaaaaaccaagaattaatccaatcaagacaacttttcctaagaacaatcatgcatgagttaaaaacccctataggaaaagggagaatcatttctgaaatgatcaaagaagacagacaaaaagaaagacttatcgctatatttttacgcatggattctttgatcaatgaatttgccaaaatcgaaaatttattttcaaaaaactacaacttacactttaaacctagtcgttttagcactatacttgaagaagctaaagaacaccttatgatagatgattttaataaagttgtaaaagtcgatataagatatgacgctttaatcaatgttgatatggaaattttctctgtaattttaaaaaatcttatcgataatgccttaaaatactcaaacaatggcacttgtgagcttttttgttgtaaagaatgttttaccattaaaaatccaggcaaacctttagcagagcctatagagcattatcttgaagcttttacaagagaaaaacacaatcaagtcaaaggtatgggactaggactttatatagtttcagaggtatgtaaactgcataattttgatttgatttatttttatgatgatggaaagcattgctttaaaattttctttggagataaagaaaaataa

SEQ ID NO: 1137 - DNA, 1716 bp, Campylobacter jejuni
atgagtcaaaaaataatcgtagatcctattacaagaattgaagggcatttaagagttgaagttgttgttgatgataacaatgtggtaaaagaagcttatgcgggctctactttgtggcgtggtattgaaaccatagtaaaagggcgtgatccaagagatgcgggttttatgacgcaaagaatttgcggagtttgtactttttcacattataaagcaggtatagttgctgttgaaaatgctttaggtattactccgcctttaaatgcgcttttaacaagaactttaatgaatgcggctttatttttacacgatcatattgtgcatttttatcaacttcatgggcttgattgggctgatgtggtaagtgctttaagtgctgatgttaaaaaagcaagcgatgaagcttttaaatacacttcaaatccttatgcaacaggtgcggataaacttcttgaagtgcaacaaagacttaaaacttttgtagataaaggaaatttaggaccttttgctaatgcgtattatggtcatccaacttatcgtttaagtcctgagcaaaatttaatcgttctttctcactatctagaatgtttaagaattcaaagaatcattgctcaatgtatggcgatttttggagctaaaaatccacatccacaaagcttaaccgttggtggtgtaacttgcgttatggatttactcgatcctgcaagaatgggtgaatatatggttaaattccaagaagtgcaagactttgttaatcgtgcgtattatcctgatcttgtgatggcaggaaaagcttatgcacatgaagcaagtgttttaaatgatataggggtaaataatctttatacctttaaagaattccaaatcggaagagatgaatggctttttgaaagtggtattatcaaaaatggagatttaagcaaggtttatgaagtagaagaagataagattactgaagaggcaactcattcttggtatgcagacaatgaacctttacatccttatgatggcaaaacaaatccaaattatacaggacttgtagatggagaaagcgtagatcatcatggaaataatgtccattctaaagtgtttgatactaagggtaaatatagctggattaaagctccacgctatgaaggaaatcctatgcaagtaggacctttagcaaatgtcgttgtaaattatgctaaaggtaatcaaaatgttgttcctgtggtagatgagttcttaaaagaaacaggacttcctttaaatgctgtatttagcacacttggaagaacagctgctcgttgtattgaagcaaaaatcgttgcaaataatgctttaaaagcgtttaataatttagttgaaaatttaaaagtagaccagagtacttgtgctccttatgtgatcgataattctaaagaatacaaaggacgctatatggggcatgtgccacgcggaacattaagccattggtgtagaattaaaaatggtgttattgaaaattggcaagctgtggtgccttctacttggaatgcaagtccaaaagacgcaaatggcgtaggtggaagttatgagcaatgtttgataggacttaaaatcgctgatgtaaaacaaccacttgaaatcattagaaaaattcactcttatgatccttgtattgcttgtgcggtgcatgtaatggatactaagggcaataatctaagtgaatataaagtgaatgtcaatttataa

SEQ ID NO: 1138 - DNA, 1140 bp, Campylobacter jejuni
atgattgattatcatcaaatagagtcgcgtttatcggctcttgaaaagcttccttctttgaaagacaatgatagtattacaaaagcattagaaaagtcaggtttttctagaagggattttatgaaatgggcaggtgctatgactgcatttttggctttgccagcgagttttactcctatggtggcaaaagctgctgagcttgctgataggcttcctgttgtgtggcttcatatggctgagtgtacaggctgtagcgagagtttgttaagaagtgatactccaacgattgatagtttgatttttgattatatttctttagaatatcacgaaacagtgatggctgcagcaggttggcaagctgaagaaaatttagaaagtgccattcaaaagcataaaaataaatacattttaatggttgaaggtggtatccctatgggtgatacagagcattttttaaccataggtgcacatggaaaaacaggctatgagctttcaaaaatggcaagtgaaaatgctttggcgatttttgctataggaacctgttctagctttggaggaattcaagctgcaagaccaaatcctagcaacgcgcagcctttaagcaaagtaacaagcaaaactgtgatcaatgttccaggctgtcctccaagtgaaaaaaatatagtgggtaatgtacttcattatttattatttggtgagttaccagcacttgatgtgtataatagaccaaaatgggcttatggtttaagaattcatgatctttgtgaaagacgcggacattttgatgcgggtgaatttgtacatgcttttggggatgaaggagcaaaacaaggtttttgtctttataaagtaggttgtaaaggaccttatacttttaataactgctcaagagagagatttaaccagcacacttcttggcctattcaagcagggcatggttgtataggttgttctgagcctaatttttgggatactatgggaccttttgaagagcctatggctagtcgtaaatttgataccgtttttggtttgggtgcggatagtgtttcagataaaatcggtataggtgtgcttacactcacaggcgttgctatagcagcacacgcagttatatcttccatgcaaaaagataaggaataa

SEQ ID NO: 1139 - DNA, 2196 bp, Campylobacter jejuni
ttgaaaccaatcgatgaagaattattgcttgaacaattaatcgataatgtaaaaaattgtaaagatttagaagctgctaaggctttgcttttcgaaatttgtggccatgatgccattcttgaaaaagcggtagattactgtatattttgccatgaagggcagtttagaaaaagtggagagccttatgcggtacatcctattttagtagcaacactggttggatttttaagtgaaaataaaagcaatattttagctgctttattgcatgatgtgattgaagatacaaactgcactgaagaagaacttagagagcagtttggttctgaggttttaaaacttgttttaggacttactaaaattatagaaattagagaagataatctcatttcatcaaaatctaaaaaaagtttaactaaatcagccttgactttcagaaatatgcttttagcaagtattgaagatgttggggttttgattgtgaagttatgcgataggctgcataatatgcttactcttgatattctaagagaagataagcaaaaaagaatcagcgaagaaactttagttgtatatgccccaatagcccatagacttggtatttcaagcataaaaaattatttggaagatcttagttttaaatatcttatgccagatgagtataagcttattgacaattatatcaattccaataatcaagaaatgcaattaggtttaaatgaatttatttccaaaatcgaacttttatttttgagtaatggctttagacaaggtagttttgaaattcaaaaacgcattaaacatagctattctatttatcttaaaatgcaaagaaaaggcattggtattgaagaagttcttgatttgcttggggtaagaattttggttgaaaaagtaagtgattgttacttagctttgggaattttacatacacattttaatcccttggtttcgcgttttaaggattatatagccttgcctaaacaaaatggttatcaaactatacataccacactttttgatgctaaaagtattatagaggcacaaattcgaacttttgatatgcataaaattgcggaatttggtatagcagcgcattggaaatataaagaagatggcagcgtggttgcgcctcgtcttgattggcttacagatatttcaatgcaaagtataaacaatcttgaaaatgcagaagattataatgctattgagctttatgaatatgctaaagatagtctttatgttgaagatgtcgcagtttattctcctaagggagaaattttcactttgcctcgtggtgcaacggttcttgattttgcttatgaagtgcataccaaagtagggcttcatgcaaaaagtgcttatgtaaatcgtattaaagtacctttgttaaccgagcttaaaaatggcgatattgtgcgagtggttactagcaatgataaattttatcgctgttcttggatagatagtgttaaaacaggaaaagcaaaagcaagtataagggaattttgcaagcaaaaaatcagagagattaatctagcaagttctattaatatgttaagttttatttttggagttgataaaaacagaattgaaacttggatagaaaaagaaaatttagtcagacgtattagacaagtagcaacagatagtgcttatttgaaagatatagttaatggtcttaaaaaatacgccaagaagtcatattggtttgataaatatgagattaaagagcaaaaaataggaaattttactctatattgtaaccataaaatcgctaatgtggattttgatttttgctgccatccaaaaagaggtgatgctgttttagcttttgttaaaggtggtaacgctattgtccatcataagctttgcgatagagctgataaaatgatagataataatcaagatatggtatttataaaatgggattctaacatccctaaatcttataaattgattttttctttggaaaataaaaaaggtgttttagcggaatttttggcatttttagctaaaatgcagataaatttattaacaattaatttatcaagtgatttaaattcggcggtagattattttgagattacaatggaaattcctgataatatcaatccagatagtgtcaaggataggttaaaatctcgttgtaaaattttagattttacatctttaaatgatgcttataaagaaagttaa

SEQ ID NO: 1140 - DNA, 1332 bp, Campylobacter jejuni
atggaaattaaaagcatattaattgctaatcgtggagaaatagcactgcgtgctttaagaacgattaaagaaatgggtaaaaaagcaatttgtgtgtattctgaagcagataaagatgctttgtatttaaaatacgctgatgcaagcatttgtataggtaaggcaagaagttctgaaagttatttaaatatcccagctatcatcgcagcggctgaaatagcagaagctgatgcgatttttccaggatacggatttttaagtgaaaatcaaaattttgttgaaatttgtgctaaacataacatcaaatttataggtccttctgtggaagctatgaatttaatgagtgataaatcaaaagcaaaacaagtcatgcaaagagcaggcgtacctgtgatcccaggaagcgatggggctttggcaggagctgaagcagctaaaaaacttgccaaagaaataggttatcctgtgattttaaaagcagctgcaggtggtggtggtcgtggtatgcgtgtggttgaaaatgaaaaagatcttgaaaaagcgtattggtcggctgaaagcgaggctatgacagcatttggcgatggaactatgtatatggaaaaatacatacaaaatccacgccatatagaagtgcaggttataggagatagttttggcaatgtgattcatgtgggcgaaagagattgttctatgcaaagacgccatcaaaaacttatagaagaatcccctgcgattttgcttgatgaaaaaacacgcactaggcttcatgaaactgctattaaggcagctaaagctataggatatgaaggtgcgggaacttttgagtttttagtagataaaaatttagacttttattttatagaaatgaatacgcgtttgcaagttgaacactgtgtaagtgaaatggtaagtgggattgatatcatagaacaaatgattaaagtagcagaaggttatgccttaccatctcaagaaagtattaagcttaatgggcattctatagaatgtagaatcacagctgaagattctaaaaccttcttgccaagtccaggtaagattactaaatacattccacccgcaggacgcaatgtaagaatggaaagtcattgttatcaagactatagcgtgcctgcttattatgattctatgataggcaaacttgtagtttgggcagaagatcgtaataaagctattgcaaagatgaaagtagctttagatgagttgcttataagtgggataaaaacgactaaagattttcatctttccatgatggaaaatcctgattttattaataataattacgatacaaattatcttgcaagacattaa

SEQ ID NO: 1141 - DNA, 1137 bp, Campylobacter jejuni
atgaaattttgtaaaaaatgtgtgatgccagatactaagcctgatttacattttgatgaagaaggtgtttgtgatgcttgtcgttctcaagaagctaaaaatcaaaatattaattggcaagaaagagagaaagaattttttgagcttataaaaaaatacaaaaaacatcctgtttatgattgtgttatcggagtaagtggcggaaaagattctacttttcaagtggttaaaatgcttgaacttggacttaatcctttgtgtgtgtgttttgagcctagcgtacctacgaaaatagggcgcaaaaatttagacaatttaaatcatcttggcgtggatttgatccatatcaagcgtgatccaaaagtttatcaaaaacttgcccgtgaagcttttataagaacaggggataatgagtggcaaaaccatttgggaatttttacttctgttccacgcatagcggtaaattttggagtgcctttgatcatctggggagaaagtccgcagatagagtatggcggtcctgcgagtagtaaaaataaaaatattttaggcagagagtggcttgaagaatttggcgggcttttaggaaatcgtgcttctgatatgcttggggtaaatggtatcactgaaaaagatttgtttttatatacttatccaagcgatgaagaacttcaaagagtaggggttacggggctatttttagggtattattttaaatgggattataaaaaaattcttgaaatttctaaaaaatatggttttttaactctagatcatcctgttgagactacttatgaaaattttgaaaatttagattgttattctaatcatgtgcatgattatttaaaatactgcaaatacggctttggtagagcaacagataatgcttgtttggatattcgtttaggttatatcagccgtgaagaaggggtgcgtttggcacaaaaatacgatggcaagccccctaaaaaggctattaaaaaataccttgaattcagtggttttagcgaggaagaatttcaaaaaatagtagattcttttaccaataaaaaaatttttaaacgtgatgaaaatggtaaatttataagagattatgatggttctttggtaagaaaagacgagtgtgttttaaaatga

SEQ ID NO: 1142 - DNA, 1962 bp, Campylobacter jejuni
atggggcttatgatgaccttcacccctactcaaaaagaactctttaataaaaacattgaagctttaagtaatctttttttaaaagaaagtttaaaagaaattaaatcaagtaaatttgaacttatcttaggtaaagataatctagatatcaatttaaaagatacaagtgataatacttttctttatgaaaatgttattgatgaattaaactctatgctaaacacttataatgataaatatctactttatcctgtattatatttttatggttttggaaatggaattttatttaaagctttattacaaaataaaaatcatcagcatattgttgtttttgaaaaagatatagaaatcatttgggtgatatttcatatcttggatttttcaaatgaattacaaagtgcaagattgatgattttgcaaacaagttctttggatatagaattgttttctaatttttgctctagcaaacctttctttcaattttctagaatttattttttagaactgatgagtcattattatgaaagatttcatgaggatgttttggagttaaataaaaagctagtgcaagattttaaagattccattctttcccatggcaatgatcctcttgatgctcttcaaggtatagagcaatttgtttataacttacctcaaatgatcactcatcctagttataaagaattactttctaaaagaaagggtataagtgatacagctatcattgtttctacaggaccatctcttactaaacaattgcctttattaaaaaagtatgctagtaaagctacgattttttgtgcggattcttcttatcctattttagctaagcataatattaagcccgattatgtgctttctttggaaaggattcctttaacttctgaattttttaacaatgattttggggaatttgataaggatattttgtttgttctaaaatcctatgtccaccctcatactacaaaatatcttcaaaaaaataatagaaattttatgcttgtatctacatatgcaagttttataaattatttaaaacttgatgattttgggtattttaatatgggatttagtgtagctaatatgaattttttacttgctatacatttaaagcataaaaatatcgttttaataggacaagatttagcttatgctaaagatggactttctcacactaaagattatagcaatcttgataaacatgaaggacattttcaaagagataaaaacaaatataccactcaagcttacggagacaatggaaaagttgaaagttcttttgtttggactctttttagacataattttgaacaagatgtggccaatgcaaaaaaaaattattatattaccacctacaactgtaccgaaggtggagcaaggatagaaggaactatagaaaaaccttttttatgggcttgtgagaatttacttcataaagatttaaataaaccttttgaaaaattagaacctttaagtttaaataaacaaaatgaatttttacttaaggcttattataaagtttatcaaagtattaaacattgtagagattttagtaataaatttattaaaagctatgataaaataaaaaattcttttatgagtttacaaaattctcaagaaaatgaaacccttatcaaagagatcattaaagatatagataaaatcaaaactcaaatcgatgagctttataatactcaaaaagatttgatgcaaattttaggtcccctactaactcaatttgaacttaatcttgctagaatttatgttttaaatcctaaaaccaaagaagatgcttttaataaaagtattctttggataaaagaacatttagaatttatggaattagtttatggacatattaaagcacaagaaaatgctttgattaaaaatatacttcctttagaagaaaaacttaaagaaagaaaattagataaatggatggaaagggtgagaaggtga

SEQ ID NO: 1143 - DNA, 1719 bp, Campylobacter jejuni
atgggttttaggataaacaccaacatcggtgcattaaatgcacatgcaaattcagttgttaatgctagagaactggataagtctttaagcagacttagttcaggtcttagaatcaactccgcagcagatgatgcttcagggatggcgatagcagattctttgcgttcacaagcagccactttaggtcaagctatcaacaatggtaatgatgctataggtatcttacaaactgctgataaggctatggatgagcaacttaaaatcttagatacaatcaaaactaaggcaactcaagcggctcaagatggacaaagtttaaaaacaagaaccatgcttcaagcagatatcaaccgtttaatggaagaacttgacaatatcgcaaatactacttcatttaacggtaaacaacttttaagtgggaattttatcaatcaagaatttcaaatcggtgcaagttcaaatcaaactataaaagctactataggagcaactcaatcttctaagataggtttaacacgctttgaaacaggaggaagaatttcatctagtggtgaagtacaatttactcttaaaaattacaatggtatagatgattttcagtttcaaaaagttgtgatttcaacttcagttggaacaggacttggagctttagcagaagagatcaataaaagtgctgataaaacaggtgttagagctacttttacagtagaaactagaggtatagctgcagttagagcaggaactacttcagatacttttgctatcaatggagtaactataggtcaagtagcctatgaagatggtgatggaaacggtgctttagttgctgcaatcaattcggttaaagataccactggagttgaagcttcgatcgatgctaatggacaacttttacttacttcaagagaaggtagagggattaaaatcgatggtaatataggtggaggtgcctttatcaatgctgatatgaaagaaaactatggccgcttgtctttagttaaaaatgatggtaaagatattttaatcagcggtagcaatctttcttctgcaggttttggtgcaactcaatttatctctcaagcttctgtttctttaagagagtcaaaaggaagatttgatgctaatatcgctgatgctatgggatttggttctgcaaacaaaggagttgtgttaggtggttattcttctgttagtgcctatatgagtagcgcaggaagtggattttcttcaggttcaggttattctgtaggtagcggtaaaaattattccacaggttttgcaaacgctatagctatttcagctgcttcgcaactttctacggtatataatgtttctgcaggctcaggtttttcaagtggttcaacactttctcagtttgcaactatgaaaacaactgcttttggagtaaaagatgaaacagcaggtgttaccacacttaaaggcgctatggctgtgatggatatagctgaaacagccacaacaaatcttgatcaaatcagagcagacattggttcggtgcaaaatcaacttcaagttactataaacaacattactgttactcaagtcaatgttaaagcagctgaatcaaccataagagatgtagactttgcagctgagagtgcaaatttttctaaatataacatccttgcgcaatcaggttcttatgctatgagtcaggctaatgcagtgcagcaaaatgttttaaaacttcttcaataa

SEQ ID NO: 1144 - DNA, 1719 bp, Campylobacter jejuni
atgggatttcgtattaacaccaatgttgcagctttaaatgcaaaagcaaacgctgatttaaatagtaaaagtttagatgcttctttaagcagacttagttcaggtcttagaatcaactccgcagcagatgatgcttcagggatggcgatagcagatagtttaagatctcaagctaatactttaggtcaagctatatctaatggtaatgatgctttaggtatcttacaaactgctgataaggctatggatgagcaacttaaaatcttagatacaatcaaaactaaggcaactcaagcggctcaagatggacaaagtttaaaaacaagaaccatgcttcaagcagatatcaaccgtttaatggaagaacttgacaatattgcaaatactacttcatttaacggtaaacaacttttaagtgggaattttatcaatcaagaatttcaaatcggtgcaagttcaaatcaaactgtaaaagctactataggagcaactcaatcttctaagataggtttaacacgctttgaaacaggaggaagaatttcaactagtggcgaagtacaatttactcttaaaaattacaatggtatagatgattttcagtttcaaaaagttgtgatttcaacttcagttggaacaggacttggagctttagcagatgagatcaataaaaatgctgataaaacaggtgttagagctacttttacagtagaaactagaggtatagctgcagttagagcaggagctacttcagatacttttgctatcaatggggtaaaaatcggtaaagtagattacaaagatggtgatgctaatggagccttagttgctgcaatcaattcggttaaagataccactggagttgaagcttcgatcgatgctaatggacaacttttacttacttcaagagaaggtagagggattaaaatcgatggtaatataggtggaggtgcctttatcaatgctgatatgaaagaaaactatggccgcttgtctttagttaaaaatgatggtaaagatattttaatcagcggtagcaatctttcttctgcaggttttggtgcaactcaatttatctctcaagcttctgtttctttaagagagtcaaaaggacaaattgatgctaatatcgctgatgctatgggatttggttctgcaaacaaaggagttgtgttaggtggttattcttctgttagtgcctatatgagtagcgcaggaagtggattttcttcaggttcaggttattctgtaggtagcggtaaaaattattccacaggttttgcaaacgctatagctatttcagctgcttcgcaactttctacggtatataatgtttctgcaggctcaggtttttcaagtggttcaacactttctcagtttgcaactatgaaaacaactgcttttggagtaaaagatgaaacagcaggtgttaccacacttaaaggcgctatggctgtgatggatatagctgaaacagctataacaaatcttgatcaaatcagagccgacattggttcggtacaaaatcaagttacatcaactataaacaacatcaccgtaactcaagtaaacgttaaagcagcagaatcgcaaatccgtgatgtagactttgcagccgagagtgcaaactactctaaagcaaatatcttagctcaaagcggctcttatgccatggcacaggctaattctgttcaacaaaatgttttaagattactacagtag

SEQ ID NO: 1145 - DNA, 1824 bp, Campylobacter jejuni
atgaccatactagaaaaaaacatacaagctttattaagtggggtaaatgaacccttaggaaataaacttttaaatttcatacaaaataaaacttgctctcgttttaatatagatgaaaatttaaatatctttgataaaactcataatgttttcatgtatgaaaacttagaagaagaaataaattttttctatcaaagtattttagaaaaaactcctagatatccttttatatgtatttatggtataggcaatgctttactgattaaaaatttagctaaacactataaacatctttttgtatttgaaagtgaaatagaactttttattctagctttaagtacgatagatttgagtgaagagctttgtagtggaaaaatttatcttgtggatatcgaagaagaaagagtagatattcaactgcttatactttttgatatgaaagatatgtttgagtacttaagtttgtatgaaatgtttgtgaataatgtttattataaaaagttttatgaggatgtctggcataaagcagatgagctttgcgagaaaaatataaaagttgtgataagaaatttaaattctagtttatgtatcggttttgagtgttattctcatcttttacaaaacatcccttctatgcttgaaagcattccttttcaaagaatcttaagtgaaagaaaaaacaaatttgaaaatgctatagtagtttctgcaggacctagtttagctaaacaacttcctttacttaaagcttatcaagataaagcagtgatcttttgtgctgatggggctttaagcatgcttgaaaaagaaggcataatacctgattatgttacgaatttagattttactgatctagcaatgaaattttttcaaaataaagaaaataaaacttctttaaatatgctttcatgtgctactcatcctagtttggttcattttttagataataaaagtgtagttttaagagatgatcctttataccaacgcttcaatcttaatgactttggctatatcgatacaggcactcatgtaagtcatttttcttataccttagctttggctttaggatttaaaaatatcatcatgataggacaagatttagcctttgatgaagaaggaaattcacactcaaaaggttttgattttggagagaaatttagtggtgaagaaaatatagataaacttaaagtcaccgcctatgcaggcaaaggtgaagttttaacgcatataacctggaatgattatcgtataaaacttgaatatctttttgcttgcaatgaacaaaaagcaaagttttacaatgctactgaaggtggagcaaggattaatttcactgaagaactttcctttaaagaatgttgtgaaaaactccttacaaaagaaaaacctcaatttgaacttccaaaaagtttaactaaaaatagaagtgataaactcctagttaaattcaaagaaaaaatacaaaaagatcaagataatgctaaaagatttttagacgatgctttagctttaaaacaaattttagaaaatatactcagtaaagattttattttacctttggaatttttagaaaaagtttatcaaaatatagaaaatttcaatcactctttagatgaagatgagtttatacaggatggtattttaaaagcagtgatgtatgagcgaggacttaagataagtttagtttataaagaaaatattatagataatgctagttttatcagtgcttatattaaagcttaccatgaatggttgctttattttatggaaaaattagagcaaagaataaatattatcatcgattcttttaaggaacttccatga

SEQ ID NO: 1146 - DNA, 1242 bp, Campylobacter jejuni
atgatagtgagtaaagcttatgagattgactcttgtgatgatgtagagcttggtataaaaagagaatcaaagcttgaatttaagctttggtatgatgatgaaaaaacacctgaagccttggtgtttgtggtgcaaggtatgggtgatgatatatcatcgatccaatatgttggtgattatatggtaaggcaatttaatactgctgtagttggagtaaattatcattgtattggcaatcgtcctcaaaccggatcaagcttttttatggatgatatagacaagcttattttaaaagcaagttgtgaagctgcggatatcaagcttccttatgatgttgataaaattcaagactataaagcaatgagtgaaatttttcattttgtaaataatcaaatagttgaaggcaagcaaaaaggtaattttacgccaaattattttttaaatttgcatgtgagtttgcaaccgacaaaaaacgagtatcaaaattttgggatcatgcaagctcaagatcttttaaatgtcgcactttaccttaaaaaacacgctccttttgatactatgggggggggtataccaattatcatgatagggggttctcacgggggatatttagcgcatttggcagctaagattgcgccttggttagtagatggagtgttggataattctgcatacgctaagtttttatggagagttgtaggttttggaaaggaaatagattttatgcagtatagtgaatttgctacttttgatttttttcatcatattaaaacacattgttcgacaaaaactttttggacgagtaattcttcatcgcctcgttttttttctcccgcaagaagaaaaattcgaaatcttttagaggaagatcatcttttaaaacaatcaaaatgtttaaaaacttgctttataagttatcattccttatacgatgagtatgtttctttaaaagaaaaaactatgttctatgaagagcttgagaaacttggttttgatgtaactttgcattctattactaaagaatctcaagttgatggaaaatttattaaaaacttaaatcatggcatgggaattccggtaaaacttttgattaagaaagaacttcccttaatgctagaaaaaataaaacaaaattcaaaaaaagattataaagaaaaatgtatctcttatccttgcgaggatttgttgtatcaatttagcgaaaaagatgacaaaatgtcactaaagatagataaaatttaa

SEQ ID NO: 1147 - DNA, 1071 bp, Campylobacter jejuni
atgatactttttggaagtacgggcagtataggagtaaatgctcttaaacttgctgctttaaaaaacattcccatttctgctttagcttgtggggataacatcgctcttttaaatgagcaaatcgcaaggtttaaacccaaatttgtttccataaaagattcaaaaaataagcatttagttaaacacgatagagtttttatagggcaagaaggtttagagcaaattttaacagaatgtcaagataagcttttactcaatgccattgtaggttttgcaggacttaaaagcactttaaaggctaaagagcttggcaaaaacatagctttagctaacaaagaaagtcttgtagtagctgggagttttttgaaaggggctaaatttttacccgttgatagtgagcatgcagctttaaaatttttactcgaaggtaaaaaaaatatagcaaaactttatatcacagcaagtggtggagctttttataggtataaaatcaaagatttaaatcaagtcagtgtcaaagatgctttaaaacatcctaattggaacatgggagcaaagatcactatagatagtgcgactatggcaaataagctttttgagattatagaggcttatcatttatatgattttaaagaaattgatgctttaatagaaccaagatctttagtgcatgcaatgtgtgaatttaaaaatggagctagcacggcgtatttttcaaaagcagatatgaaactagctatttcagatgctatatttgaaaaacaagatacgcctattttagaggctgttgattttagcaaaatgcctgctttaaaatttcatccaatcagcacaaaaaaatatcctatttttaagcttaaaaatacatttttaaaagagccaaatttaggtgttatcatcaatgctgctaatgaagttggtgtttataattttttagaaaataaaagtggatttttagacattgctaaatgcatttttaaagcccttgatcattttggagtacctaaaatttcaagcatagaagaagtttttgagtatgattttaaaacaagagagtatttaaggagttaa

SEQ ID NO: 1148 - DNA, 1806 bp, Campylobacter jejuni
atgaaatctgttattataggaaccgcaggacatattgatcatggaaaaacttcactcattaaagctttaaatggttttgaaggcgatagtttaaaagaagaacaagaaagacaaatcaccattaatttaagtttttcaaatcttaaattaaaagataaaaacatttcttttatcgatgttccaggacataaagatttggttaaaactatggtaagtggagcttttggctttagtgtttgtttatttgtcgtagatattaacgaaggtttaaaagaacaaagtttagaacatttagaaattttaaaaattcttgatattaaaaatatcattttagtgcttagcaaatgtgatctttgtgaaaatatagagcaaaaaagtgtagaaattttagaagagttaaaaaatttagattatcccattttaaaagtatttcacaccagtataaaaaataatcaaggcatagaagaattaaaaaattatctttataccatagaaaacaaagaaaacgatgaagaactgatttttcattattatatcgatagagttttttctctaaaaggcataggaactgtcgttacaggcagtcttaatgaaggaagcatcactttaaatgaaaaaatcatctgtttagacactcaaaaagaactcattgttaaaaatatacaaaaccacgatactaatttagagcaaatcaaagcttgtaaccgtgtggctttaagtttaaattgtgattataaagagttgaaaaaaggttatttgctaagtaaaaaaggttattttaaagcctttaaagaatgtgatgctttagttaaagcaaaaaatttacaaaatagcaaaatgattttttgtgtaggttcaagacaaatagaatgcaaaataaatatattaaaaaaactagaaaatgatgaattttttgtgcattttagttttgataaaaatgtatttttaagttttgatgaggcttttattttattacaaaataatcgtgttataggcggtggtaaggttttaaatcctttaagcgaacctttaaaaaaagaacaaaaaaataaatttttaatgtttttgaaaaataaagattttaaagcagctttttctttcttaaaagacgcacataaatacggctttggtttgctttcaagctatcagagatttaaactctctcatcaaaaagcattgaaattagcaaaagaattaaatcaagtatttgttgatgaaaaaaatcttaatgtatatcatttacaaagcctagaagaaattaaaaatttcatcaaattcatacttgaaaaaaatccttatgccatgctttcagcacattctttagctttaaggattacttgggcaagtgaaaatttttgcgaacttgggcttaaagaaatgtcaaatttattggattttcaaaatggaatttattttaaaaaaggtatagattttgaaaaacttcaagaaaaaaacaataaccaaatgtatgaaattttaaaaaaacaaggtattaaacccgaagctccttataatctttatgattttttagaacttgatagaaaaagcggagataatatactcaaaaaacttacccaaaaaggcttggttgtaagactttcacacaatctttttatagaaaaacaagctcttgaaaaacttatgcaagaatgtttaaatttattaaaaaatcaaagtcttgatgtgcaaagtatgaaagaatattttaatctttcaagaaaatatgctattgcttatttagaatacttagacaaatttcctcaagtaagtaaagaagctgaaaaaagatttttaacaaacatttag

SEQ ID NO: 1149 - DNA, 711 bp, Campylobacter jejuni
atgaaaaaattaagtttaattcttgtctgttcagcatctttgtttgctgcaagtaattcagaaattagtgatttttattcaaaaagcattaaagcacaatttccaaatgctaccgttagtgtatcaaatcgtcaaaaggttggtaatacgggttttgaaagtgttattgtaagcgttgaattaaatggacaaaaacaagaaaacattctttttacaaaagatagtcttattacccctgatcttatcgacttgaaaacgggaatttcttatgctcaagaatatgaaatgaaaaaatttcaagaagcaagagaaaattttacaaaaaatgctaaagctgtagcacaaaaagaaaccatggtaatagctttgggagataaaaataaacctgcaatttatgttttttcagatcctgaatgcccttattgtagagaacatttagctcaaattgatgatgaacttaaaaactatcaagttaattatattttaactccagtacatggaaaatctgcttttgaaaaatccgctctaatctacaaggaagcaaaaaaagcaaaaaatgataaagaaaaaatcgcaattttaaacaaatactatgatgcaaatatcaaaaattatccaaaagtaagtgatgcagaattaaaagaagttttttccttatatgaaaaatatcgctcattaggtcttagcgctactccaactattattaaataa

SEQ ID NO: 1150 - DNA, 1878 bp, Campylobacter jejuni
atgctcaacccaaattcagccatagaaagagtaaaaaaccatttagcttataaactaggtcaaactgtgatagaacatagacataacgggggggggtatatagcattatttaaaaaactctataaaatcaaaaaacaacataaaaaagaacaaaaaatttatcaacaaatcatacaagtctttccccaacttaaatacccaagtttagaaacatgttctgattataatgaagctttaagatgtaaattccatttatcttacatgataggtgaagttttaattaaggcttatcagaattggtataaaggaggtggatttaaattaaaaaataatattaaaaaagcaaataaagaatttcaaatttttagagaaattctaaaagaatttaaagaattaaatggtgaaactttaaaagctattcaagataataaacaattattcctaaaagaatttccaagaataaaaaatatcttaaaaacacatcaagattatcaacctatactagataatatctttcacaactttaattattttataaaaaatttcgatcttatagaagaatggttattatcagatgatttcaaagaaaaatataaaaaagaaaaccatccttatccttcattacttgatcctaaaaaacttaatgatgaaaatgaaaaaatcaattatcataacatacctgctgaacttgcttggaagatgaatttgcctttaccacccaattatgagtttgttggattttttttgcatacaagtggagaaaaagctatggagagatttttaaaagaagttggtgttgtgcttattggtgcatttggatatgaggatggtaagcgttatattagtatttttaattttttgattagtgaagcttgtgcatgcaatgatttaaaatttgccataggtatactcgatgtgaattgtcaaaagtatgataaattttgttttttgttgcaaaataaacctgtattgattttgcttagagatcctattgattctttgaaatcttttattaatgttagacatcagaaaaatggatttaatgaaattcttaaaatagatattaacaatactgattttgataaaattaatgatagaatagtttatgttcacgaatcaaatggttgttttaatccagatacaaatcaaaaatttccatctcttgaaagtatcaaagctctttcagatactaatcattggatgttaatgtataatattagaagaaataagactatagaattttttagatttaataaaattatttatattgatatgatggatatagttggagacaagactttatttacattagagaaattatcaaaaatactgaatttttcttccccagataaaaataataaaatattttatcagcaattatattcaccattaacagtattattaccttgtattataaaagtaaataataaggtcaaaatttttgtttcaaatagattttctgtaaaaaacatacaaattatggaaaattgcatagatatcactgataagtttaaagaaatttttcatgaaaacttgattattttttgttcaaaagatcattttgatagtttgataaataatcaaactctttataatgttgttttagaatatattaataaatttttaatttctttaaaaaaaaggattaatgttgaaaaaaataaagaagtgaaagtagacgatgtattggattattttaaaaagaatataagtgtagcaaaatcttataaggatattttagatgaggaattggtttacatcaagcaacatcgtccagatatagtagcttcttggaaatactaccaagaatttgaaagaatgtgtaaagagttagatgagaataatcaaaacccatctttatcattttctaatcaataa

SEQ ID NO: 1151 - DNA, 852 bp, Campylobacter jejuni
atgaaaaaagaacaattggaagtattaaaagaggctctaaatggcttgatttatcaaattgataatcatcagcaagctaggaaaccaatagctgatgtagaaaggataatttcagagttgcaagtattaaaccattggaataagcaagaaaatgtttataatgcattgcatttaattcagggtgctatagccgatccacaagggcttggtagattaaatttgttattagataatgccagaattccaaaacaatattatgatattttttacaagatgctttatgtcgataaatatggggggggggatggatatcgtccagtatgtattgattgtggtggacatgcaggcttaattactgatattattttacattgtggcgggcaaagttatatctttgagccaaatatttatttaaattattttttaagaaaaaaatatgaaaataatataaatgtaaaactttttcaaaaagcagtatcggacagaaattatgaaacagattttattatgtttggaaataggatactatctcaaggcaatcgtatagttgaaagtgtacaagacagtcagacggaaaaaacatataaagttcaagtaattgatttatgcgagtttatcgaaaatgaaattttaacacaacataaaaggatttattttctaaaacttgatattgaaggaatggagtttgagataatgaaaaaaattattgaaaaaaaaatatataaaaaaattgattatattgcttgtgaaacacatgaatatatgtttgatgattcagagaaaaagataggggagttaaagcaattgattaataaatgtaatattcaaaatattttacttgattggatatga

SEQ ID NO: 1152 - DNA, 342 bp, Campylobacter jejuni
atgaaagtggataattttttaaatacttatagtatgaatagcgctttacttgatcgtgcagccaaagcaagaagtttagaatcaagcatcaaaataaatgacaatgatatagttacaaagagcaaagaagataaagccttaaaagaacaaaccaatgcttttgaggcattttttttaaagcaagttttagatgtatctttaaaaagtcaaaattcactctttggaaaagatgccagcgatgaaatatactcttccatgtataatgataccatgagtaaagctttaagtggaggtatgggtttttcaaaattattatacgattttttaaaagaaaggggttaa

SEQ ID NO: 1153 - DNA, 1827 bp, Campylobacter jejuni
atgggtatttttggaacattatacacaggtgttacaggcttaaaggcaagcgaagttcaaatcgcaacaactggaaataatatctcaaatgctaatgcaactttttatacacgccaaagagtggtgcaaactacaaatggatatattacaacaggtggagttcaagtaggcacaggaactgctgtagaaagtatagtgcgtttgcatgatgagtattcttactataaattaaaaggtgcatctactcaactagaatatactaaatatatggcttccactttacaagaaattgcgcagcgttttcccgacttacaaaatactggaattttgcaagatttagaaaattataacaaagcttggaatgattttgcatctaaccccaacgaaaatgccacaaaaatagcccttgtaaaagcttctcagaccttaacagaaagcgttaataacacttttgcaaccttagataaaatccaaaaaaaagtaaatgatgatattaaaaatacagttgatgagattaatagaattggtgaagaaattgctactataaataaacaaatttatggacaagaagccttaccaacagaacacgcaaatgaacttagggatagaagagatgaacttgagcttactctttcaaagctagttagtgcagttgcaagcaaaaatgaaatcaatcaagacaatcgccttgatacaaccatcactgatccaggacatcaatacaatctaagtatagaaggttttagtatagtagatggaataaattttcatcctttaaagcttgattatgatgataaaaataaatcttatagcatttattatgaaactcctgatgaaaaagttcgcgatcttactgcaaaaattagcggtggacagcttggtgctcaacttgacttacgcggtagaaactatagcaaaagcgaaggaaaatatgaagatggaattatccaaggttatatggattctttagatacttttgctaagaccatgatcaatgaaactaacaatctttatgcaagttctgcgaaaagttctgttacttctgattatctatctgggcttaagggagatattcctttagttaattacgatagaaccatacaaccaggaagttttgatatagtcatttatgatgataaaggcgataaaaaactcaccaaaaccatcaccatagatgtaaatacaaccatgaatgatatcatgcgccaaatcaatgctaatacagatgataatgacaataaaaattcaaacgatgatgttgatgatcatatcaatgcaagttttagctacgatgcaaaaactggagatggtttatttcaaatcaatgcaaaatcaggttttaaggtagccattgaagataagggcacaaatttcgcaggtgcgtttagcataggtggttttttcagcggaactgatgcaagtgacatgaaagtaaaagattccatcttaaatgatccaagtacagtaagagcaagctcaaatggagttgatagtggtaatgacatggcaaataaaatcatccaacttcaatataaaaaagttaatttttataatgaagatggcactatcgataatcttactatggaagaatattaccgcaaacttacaggtaaaatagcctcagatggtgaaaataacaatgtcgtcaattcaagcaatgaaactctttataattctgtttatagcgagtaccaatctaaaagtggcgtaaatacaaatgaagaattagccgcccttatacaatatcaatcaagttacggtgcagcagcaaaaatcgtctcaaccgtagatcaaatgcttgataccttactagggcttaaatcttaa

SEQ ID NO: 1154 - DNA, 1419 bp, Campylobacter jejuni
atgataagattaatattaatattaattaacattcttttttgccattatctttatgctttagattgtcaaaagcgtctttttgatatcagtattaacgaaaaattaagcatacaagaaagtcttgatgagcttgcaaaatattgttctttcagtattattgttaaagataaaattgccaaagaaaaattagaaacattgcaaaactctgtcaatattcatcaaatgagtttggacgaaatttttaatttttttatcaaagagcatgatcttagctatgattttgatggtaaaattttaagaatttcaggcattaatacgaagatttttaagataagttatatcacttctatcagagaaggacaaagcataactaaagcgtctgtagacgctaaaccaaggcaaagtgaatatagcggtagttttgatgatgcagaagacaacatgattaaaagtatggaaaaatttgatttttggcaaaatatagaaaaagagattattgtattattaaaaaattctcatgaagattatgaggctaaaactcccattataaatcccaatgcaggtcttattatagtaactggaacaaattctcagttaaaaagtgtgaaaaattatttgcaaaaactagaaaatcgtcttaaaaaacaagttattatcgatgttagcatacttgctgtgagtttaaatgaaagccattctagtgggattaattggcaaaattttaatataggtttaaattcacaagtaaataatgaaaattcttttattcagtttcaaaatgggcaaggttttgttaagaatttgggtttaagggcgaatttaaattttgattctattattaactttctttctcaaaatggaaaaactagcgtgctttctaatccaaagcttatggctttaaataaccaacaagccattatttctgtaggcgatactataaattatcaagttaaagaaagttctaaaggtactgaaaatgggactactgttagtgaaagttataataattattctatttttgtaggcattttactcaatatcttgcctgaaatttctgatgatggaaaaataatgcttaggattaatccaagcttaagtgattttaagtatccagaagataataaacgacaaaaagaaccaagaactattgctcctgataccatacaaaaaaagctttctagtgttgtgcaagtagagaataatcaaactttaattttaggcggattgatttctcacgataaatctaatgagaaaaattctatcaattttctatcaaaaattccaatcctaggttctttgtttaaaggagaagttttaaattctaaagcaaccgaaatcgtttttattatcactccaagtatagtagatagcgtaaatgctccaagtcttaaagatctaggatttaagcattatgagtaa

SEQ ID NO: 1155 - DNA, 960 bp, Campylobacter jejuni
atgaaaaaaatattcttatgtttaggtttggcaagtgttttatttggtgctgataacaatgtaaaatttgaaatcactccaactttaaactataattactttgaaggtaatttagatatggataatcgttatgcaccagggattagacttggttatcattttgacgatttttggcttgatcaattagaatttgggttagagcattattctgatgttaaatatacaaatacaaataaaactacagatattacaagaacttatttgagtgctattaaaggtattgatgtaggtgagaaattttatttctatggtttagcaggtggaggatatgaggatttttcaaatgctgcttatgataataaaagcggtggatttggacattatggcgcgggtgtaaaattccgtcttagtgattctttggctttaagacttgaaactagagatcaaattaatttcaatcatgcaaaccataattgggtttcaactttaggtattagttttggttttggtggcaaaaaggaaaaagctgtagaagaagttgctgatactcgtgcaactccacaagcaaaatgtcctgttgaaccaagagaaggtgctttgttagatgaaaatggttgcgaaaaaactatttctttggaaggtcattttggttttgataaaactactataaatccaacttttcaagaaaaaatcaaagaaattgcaaaagttttagatgaaaatgaaagatatgatactattcttgaaggacatacagataatatcggttcaagagcttataatcaaaagctttctgaaagacgtgctaaaagtgttgctaatgaacttgaaaaatatggtgtagaaaaaagtcgcatcaaaacagtaggttatggtcaagataatcctcgctcaagcaatgacactaaagaaggtagagcggataatagaagagtggatgctaaatttattttaagataa

SEQ ID NO: 1156 - DNA, 603 bp, Campylobacter jejuni
atgaaaaaaatattacaagatggcttttttttagctatcttcttctttgttttattgccttctagggtttttgctcttgatgctgtactttttaatgaaaatattttaagtcaaaaagtaagtaacgagattaatcttataggaaaagagctttaccaaaaaagtaatatttttatcggcgttatggttggtgataaaactgaaattgaaactttattaaataaacaaaaagaacttcctcaatcttatatattgcttcttttgtcaaaaaattctcacaaagttgatatagtgggctcaaaaggtgctttagctttgattgataaagaagctgtgcttagtccttatcctggaacaggatctattttgccgatattagctacaaataaaggtgatatttataatgctgctatacttaatggttatgcagatattgtagatcgtgtggcaaaatccttgggattacaattagaacattctataggtaatgcaaatcgtgatactatcaatattttaagaatacttatctatggatttatttgctttgcattgttatactatgcacaaagaagaataaagaggaaaaaaaatgttagaaactaa

SEQ ID NO: 1157 - DNA, 1209 bp, Campylobacter jejuni
ttgaattcttttaaacaaaaatatttaatcaatttttgggacaattcccgttctatgattgcacttggaattttaagtgcagtgtattttgggatttttggtggcgtttgggctgttactggagaaatgacacgttggggtggcgagtttttagagcttttaggtatgaatttagatggatattcttattaccaaaagcaaaatttaaatggaacccctttaacaagaactgatggtattatgctcataggtatgtttataggttgtttagtagccgcacttttagctaacaaagtcaaatttcgtctacctgctagcaatataagaatttttcaagcaatagtaggtggaattctttcaggatatggagcaagacttgcatttggatgcaatttagctaatttttttacaggtttaccttatttttctttacacacttggctttttactgtttttatggttttaggaatttatctaggagtgaaaatttgcaacacttccttttttaaacctaaagctaaattagaacgtgtaaataaagaaaacttgccgttaaacaagcaaagtttgcgtacaaaattatattttaacttaggcatattgcttttcatagcctttttagtttgggtgttttatcttgtttttacaaatggcaatatcagcacacaaaacaaacaaagtcttctagctttagcactgatttttggttttgtttttggctttgttatttctagagggcaaatttgttttacttcttgctttagagatttatttttatttggtagagataatgctataaaaggcgcattaatcggtatgattatcgcctctttaatcgcttttgcttttatcttgcaaggtcatactagcaaactcatagaactttctcctgctgtagctgtgggagcatttttgtttggttttggtatagtttttgccggaggttgcgagtgtggttggacttatcgtgcctttgaaggacaaagtcattttataatagtaggaattgcaaatataataggaactatgattttagctttaagttataactttttaccaaaagcttttaaagaaggtataaaaatcaatcttttaactgaatttggcaatttaaatggattttttatcaaccttattttattcatcttaatgtttgtttttgtagtattttacaaaaaacacttttttaaaaatcaacttaaaggataa

SEQ ID NO: 1158 - DNA, 2103 bp, Campylobacter jejuni
atgtttaaatctttaaatataggtttaaaacttattttttctgtggcagctgttgttgttattggacttgttattttaatttcattaatcacaaaacaagtaagtcaaaatattaccaaaaatacagaagatattcttgcttctatcacgaaagaatatgctactcaaactcaaggaatttttggggaaatgatcgctttaaataaaagtatttcaggtactttaacagaaatgtttagatcaacctctaaagaagatttagatatagacaatataacaaatattataaccaatacttttgataatagtgcttattctaattttacttatttatatcttattgatccgccagaatactttaaagaagagagtaaattttttaatactcaaagtggaaaatttgttatgctttacgctgatgaagaaaaggataataaaggcggaataaaagcaatacaagctagtgatgaaatagctaatctgcaagttgtgcaagatatattaaaaaaagcaaaatatggggaaaataaagtatatataggccgtcctattaagatgaatttagaaggtcaagattttgatgctgtaaatgttgctatacctatttttgatcgaaaaaatcaagttgtaggtgtcataggcatgactttagatttttcagatattgctacttatcttttagaccctaaaggtcaaaaatatgatggtgaattaagagttcttttaaattcagatggttttatggcgatacatccaaataaaaatctagttttaaaaaatttaaaagatatcaatcctaataaaggtgcacaagaaacttataaggccataagtgaaggaaaaaatggagtttttaactatatagcttctgatggtgatgattcttatgctgcgattaatagttttaaagtgcaagatagttcttgggcagttttggtaactgctcctaaatattcagtatttaaacccttaaaaaaattacaattaattattcttggtgcatcttttatttttatttttgttgttttaggagtggtttattattgcgtaagaaaaattgtcgcatctagattgcctgtgattcttagttctttagaatcatttttccgttttttaaatcatgaaaaaattgaacctaaggctattgaaattcgtgctaatgatgagctaggagcaatgggaagaatcataaatgaaaatattgaaaagattcaaatatctttagaacaagatcaaaatgctgtagatgaatcggtgcaaactgctagagaaatcgaaaagggtaatttaactgcaagaattactaaaaatcctataaatcctcaattagtagaacttaaagatgttcttaataggatgcttgatgttttacaaagtaaaattggttctaatatgaatgaaattaatagagtttttgatagttataaggctcttgattttagtacagaagtatttaatgctaaaggtgaagttgagattacaactaatattttaggcaaagaaattaaaaagatgcttttggcttcttcaaattttgctaaagatttagccaatcagtcagaagagttaaaaaattctatgcaaaaacttgctgatggctctaatgcacaagcgagttctttagaacaatcggctgcagctgtggaggagattaattcttctatgcaaaatgtaagtggaaaaacagttgaggttgcttcacaagctgatgatataaaaaatattgtcaatgtgattaaagatatcgctgagcaaacgaatcttcttgctttaaatgcagctattgaagctgcacgtgctggagaacatgggcgtggttttgcagttgttgcagatgaggtaagacagcttgcggaaagaacaggaaaatccttatctgaaatcgaggcaaatattaatatacttgttcaaagcgtaaatgaagtagcagaatctgtaaaagaacaaacagcaggaatcacacagattaacgatgctatagcacaacttgaaactgtaactaaggaaaatgtcgaagttgcaaatgtcaccaataatataacaaatgaagtcaatcaaattgctgcggcaattcttgaagatgtgaataaaaaaagattttaa

SEQ ID NO: 1159 - DNA, 2805 bp, Campylobacter jejuni
atgtcaagtgtaggtgaaaatatcaagcttacgcgtcgttcttttcttaaaatggcagcactttcaagcctagcaacaccgttgcttgctagaagtgaaactttaagagaagcgagtgctgatgagcttaaagaagcttatgaaggtagtaaaaaagtaaaaacagtttgtacagcctgttctgtaggctgtgggattattgcagaagtgcaaaatggtgtttgggtgcgtcaagaaatcgctcaagatcatcctgtgagttcaggtggacattgctgcaagggatctgatatgatcgatatggtgcgttcacatgtgcgtttaaaatatcctatgaaaaaagaaaatggagaatggaaacgcataagttatgagcaagctttaagtgagatcggagaaaaactagctgcttatcgtaaagaaaatcctgaaagtgttatgtttttaggttctgcaaaacttaataatgaacaagcttattatataagaaaatttgcagcattttttggaacgaacaatgtagatcatcaagctagaatttgacacagcgcaacagtcgccggtgtggcgaatacatttggttatggcgctatgacaaaccatcttggagacatccaaagaagtaaatgtatcattatcattggagcaaatccagcggtaaatcaccctgtgggttttagacatttcttaaaagcaaaagaaaaaggtgcaaagcttatcgttgtagatcctagatttacaaaaagtgcagcaaaagcggatatttatgcaagaattcgtccaggaactgacattgctttcatgtatggaatgttaaaaatcatttttgatgaaggcttggaagatacaaaatatcttgatgaaagagtttttggaattgataaaattcgtgaagaagcagcaaaatggacagttgaagaagtggaaaatgttacagggatctctaaagaacttttggtgcaaatcactcacgaagtagctaaaaacaaaccaactacgcttatttgggctatgggtttaactcaacatactgtaggaacttcaaatacacgtttagcacctattgtgcaaatggtacttggaaatataggtaaatttggtggtggagttaatatcttacgcggacacgataatgttcaaggtgcttcagatatggcttgtttgagcgaaaatttaccaggttattatcctttaaatgaagcgacttggagatactatgccaaaatttggggtgtggattatgagtggcttttaggaaattttgtaagcaaagattggatgcataaaactgggctttcacttgctagatggtgggcagcggctttaaatggaaaagatggaaatgatgctatcgataatgcaggaacgcctttaaaagctttagtagttatgggaaatggtattacttcgactgcacaacaagtaaaagttaaagaaggtttggaagctttagagcttttagttttagccgatccttttgtaaatgaagcagggattattgcagaaagaaaagatggaatttatcttttacctgcagcaacacagtttgaaacaagcggaagtgtaacagcaacaaatcgtagcggacaatggagatttaaagttgtagatccactttatgaaagcatggaagatcaagaaattttatttgagcttgctaaaaaattaggtttttatgaagactttaccaagactttacgcgatgaaaaaggtgagattgtttggcctgaaaatgcaacaagagaaattgcaaaagcagttagaagtatagggcttaatggttggagtcctgaaaggcttaaaaagcatactttatactgggataaatttgatgaggtaactttagaaggaaaagacgaagttgctggcgagtattacgggcttccttggccttgttggagtgataagcacccaggttctcctgtgctttataataccgacattgaagtagcaaaaggtggtatgggctttagaaacaattttggacttgaatatgaaggagagagtttacttgctaagaatgcacctttaaattcacctattgatacaggttatccacaaattactaaagataatatagaaaaagttttaggtattactttaagtgctcaagaaaaagaaaaaatgggatcaacttggtcttatgatgatagcaatatcatagcaactaaatgtatagaaaaaggcatagttccttatggaaatgctaaagctagagctgtagtttggacttttaaagataaaattccactccaccgtgagcctttacattctccaagaaacgatttggtgcaaaaatatccaagttttgaagatcaaaaagcgctttaccgcgtggatactaaatttgtttctgtgcaacaagctaaggattattctaaagaattcccgcttaatcttgttactgcaagacttgtgaatttaaatggtgcaggtatggaaaatagagcatctatgtatctaacgcgtttaacacctgaaatgttttgtgagatcaatcctgaattagcaaaagagcaagacattaaagcaggagatatgatttgggtgcattctccagaaggtactaaaattcatgtaagagtgaaggttaatccaggtgtagcaaaagatatgattttcttgcctttccattttacaggagttatgcaaggcgtggatttaacgcacaatttcccagaaggaactaagccttatgcaagcggagaaagtgctaatacggtaacaaattatggttatgatatcatgtgtcagattccagagactaaaggtggactttgtagaatcagtaaggatggaaaatga

SEQ ID NO: 1160 - DNA, 579 bp, Campylobacter jejuni
atgaaaaatatactcttgcttaatggtgctaaagaatttggaaattcaaaaggacaacttaatttgacattgcataatcatgctttagaaattttaaaaacactaggatacgaggtagatcaaactcacatagatcaaggatatgatcctaaagaagagatacaaaaatttataaaagctgatgctgtgatctatcaaatgccagcttggtggatgggggagccttggatagttaaaaaatatatcgatgaagtgtttggtttgggtgctggagtgctttttaaaaatgatggaagaactcatgaaaatcctagtaaaaactacggaaaaggtggtttagatcatggtaaaaaatacatgttttctctcacttggaatgcacctcttgaagcctttaatgataaaaatgaattttttgaaggaaagggtgtagatatggtgtattggcatttgcataaggctcatgaatttataggtatgaaagctttaccaacttttatgtgtaatgatgtggtaaaaaatcctcaagtggaaaaatatctaaacgagtatgaactacacttgaaaaaaattttttaa

SEQ ID NO: 1161 - DNA, 1467 bp, Campylobacter jejuni
atgataaggacggttatggattttaaatttgtactaagattgttagaagcaaaccaatttgagaatgaagtggttgaatataagaaaaataataaagattttattgtattaggaaaaaatatttctgctttgtcaaatacagctgctttactgggtatagataaagcatatataatttttggcattgaagatggtacgcttaatattgtcggtacaaattttaaaccaaaacaagaaaaaaagggaaatgaagagcttgaaagttggttgcataaagttttaaaacctaatatagaatttaaaattcatgaaataacggaaaaagaaatcaggttggtggtatttgaaattgaggcaactaagatttcaccaataaaatttgaagaaaaagcttatataaggataggcagtaatagaaaagaattggataaatatccagaaaaagagaaaaaattatggcaagttctttcaggcttttcttttgaaaatgaaatagctaaatcaaatttaaatattcaagatatatatgatttattggattacagtaagtgttttgatatgttagatatatcttacgataattattcttcagatgaatatattattgaaaaattaattgagcatggtttagttaaaaatttgaatgattcttttgctattactaatttaggtgctatcttgtttgcaaaagatttaacaaaatttaaaggcttaaatagaaaaagaattagatttataaggtatcaaggtaaaaacaaaattcatacattagaagaattagaaggtagaaaaggatatgctattggttttcaaggattgatttcatatataatgcagtatgttcctaaaaatgaagtgatagagaatgcgataagaaaagatactactttatatccagaaatcgcaataagggaacttgtagctaatgcgataattcatcaagattttacaataaatggtagaaatccaatgattgaaatgtatagcgatagaatagaaataacaaacaatggaaaatctcttatagatattaaacgattaatagacatgccatcaaagtcacggaatgataagttggctaatttaatgagaataatgggtatatgtgaagaaaggggttctggtgtggataaggttatagatagcgttgaagcttatcaattgccagcaccagattttataaataatgaagattattttcaggcaattttattttctcatatgcccttagaagatatgaccaaacaagatagaataagagctacatatcaacattgttgtttaaaatgggcttcaagagaagccatgacaaatgctagcttaagagctagatttaaaataggtgataagcaacattcaaaagcttcaaaaataattagcgatactttagaggcaggtttgattaagcagcaagatccagaaaataaatctacaaaacatgttaaatatgttccattttttgtttag

SEQ ID NO: 1162 - DNA, 1503 bp, Campylobacter jejuni
atggcaaagaaaaaagaaataaaactagaagatgcgttatggaaaagtgctgataaattacgcaaaaatatcgacgcagcagagtataaacacatagttttaggacttatatttttacgctacattagcgatagctttatgcaaaaatacgaagagttattaaaagaacaagatgatggagccgacccagaagatgcagatgaatacctagctgacaatatcttcttcgttccagaaaaatctcgctacaactacataagagataacgccaaaaatcccaaaataggcaaaatgctagatgaagcaatggacgagatagaaaaacacaacgatactctaaaaggagttttgccaaaagtctatgccaaagataacttagatagtaaatgcctaggcgaacttatagatcttataggaaatatcgcctttgacactggtaaaagcaccgatgttttaggtcatgtatttgagtattttttaggtgaatttgccctagctgaaggcaaacaaggcggacaattctacactccaaaatgcgtcgtagagctcctagtaactatgcttgagccatataaaggcagagtgtttgatccttgctgtggaagtggcggtatgtttgttcaaagcgaagagtttgtaaaatctcaccaaggcagactagatgacatctcaatctatggtcaagagtcaaatcagactacctacaaactcgccaaaatgaacctagccataagaaaaatcgaaagctcacaagtgatatggaacaacgaaggctcatttttaaacgacgctcataaagacttaaaagccgattttattatagccaatccaccatttaacgactcggactggagcggcgaactgttagaaaacgatggcagatggaaatacggcgtcccaccagcaagcaacgccaactacgcttggatacagcactttttatatcatctatcaccaaacggcggtgtagcgggatttgtcctagctaaaggcgcacttacaagcaacaccacaaatgaagcagccattagaaaagcacttattgaagatgatttgatagattgtatagtaaatctacccgcaaagctgtttttaaatacaggtattcctgcatcactttggtttataagacgccaaaagctaccaaagacagtcaaaaaaacgctttttatagatgcaagagatttaggaactaggataaatagacgcaacaaaaccctaaacaaagacgatataaaccaaatcgcaaatatttataaagcatggaaaaacggcactgattatgaagacataaaaggcttttgtaaaagtgttagcatagatgagataagagagctttcttatgtgcttaccccagggcgttatgtggggcttgctgatagtgatgatgagtttgattttgatactagatttaacgagcttttagcaaagttaaaatcccaaatcaaaactgagcaagagctaagtgaaattatcttaaaaaacttagagaagattaaatga

SEQ ID NO: 1163 - DNA, 1989 bp, Campylobacter jejuni
atgctaaaaataacaaagattaaaaggaaaataatgaatagtattaaaatcaaactttccctcattgcaaatttaattgcaatttttgccttaattgttctaggtattgtaagtttttattttacaaaaacctcactatatgaaagcactcttaaaaatcaaactgacctacttaaagtcacacaatctaccgttgaagatttccgttccacaaatcaatcttttactagagctttagaaaaagatatcgcgaacttaccttatcaatctttaatcactgaagaaaatattattaacaatgttggtccaatattgaaatattatcgtcatagtataaatgcactaaatgtttatttaggtttaaacaatggaaaagttttacttagtcaaaaatctaatgatgcaaaaatgcctgaattacgtgatgatttagatataaagacaaaagattggtatcaagaagctttaaaaacaaatgatatttttgttacaccagcatatttagatacagttttaaaacaatatgtaataacgtattctaaagctatttataaagatggtaaaatcataggggtactgggtgtcgatataccatcagaagatttgcaaaatttagttgcaaaaacccctggaaatacttttttatttgatcaaaaaaataaaatatttgcagcaaccaataaagaattattaaatccatccattgatcattctcctgttctaaatgcatataaactcaatggtgataacaacttcttctcttataagttaaataatgaagaaagacttggagcttgtactaaagtctttgcttatacagcttgtattaccgaaagcgctgatattataaataaacctatttataaagctgcatttattcaagccattgttgtcattattgtagtagtatttagcgtcatcctcctttatttcatcgtatcaaaatacctctccccacttgcagctatccaaacaggtttaacttcattctttgattttatcaactataaaacaaaaaatgtttccactatagaagtaaaaagcaatgatgaatttggacaaatctcaaatgctatcaatgaaaacattcttgctactaaaagaggcttagaacaagacaatcaagccgttaaagaatcagttcaaaccgtatcagttgtagaaggtggtaatttaacagcaagaattactgctaatccaagaaacccacagcttattgaacttaaaaatgttctaaataaacttcttgatgttttacaagctagagtaggttctgatatgaatgctattcataaaatttttgaagaatacaaaagcttagactttagaaataaattagaaaatgctagcggtagtgtagaattaactactaatgctttaggtgatgaaatagttaaaatgctaaaacaaagttcagactttgctaatgctttagctaatgaaagtggaaaattacaaactgctgttcaaagcttaaccacttcttcaaattctcaagctcaatctttagaagaaactgcagcagctttagaagagatcacttcttctatgcaaaatgtttcagttaaaactagtgatgttatcactcaatctgaagagattaaaaatgttacaggtattataggtgatattgcagatcaaatcaatcttttagctttaaatgcagctattgaagcagctcgtgctggagaacatggtagaggctttgcagtggtagctgatgaagttagaaagttagctgaaagaactcaaaagtctttatcagaaattgaagctaatactaatttacttgttcaatctatcaatgatatggcagaaagtattaaagaacaaactgcaggtatcactcaaatcaatgatagcgtagctcaaattgatcaaactactaaagataatgttgaaattgctaatgaatcagctattatttctagtacagtaagtgatatagctaataatatcttagaagatgttaagaagaagaggttttaa

SEQ ID NO: 1164 - DNA, 1536 bp, Campylobacter jejuni
gtgcttagatggtttgttttactatttttattgtttttgaatcttgaggctaaaattccaaaagatacacttattatagcagttgaaaatgaaatcgcaaggataaatcctgcttatagcgaggatcatgatgcagtgattaatcttgtattttcagggcttacgcgttttgatgaaaatatgagtttaaaacctgatttggctaagtcttgggatattagtaaagacgggcttgtttatgatatttttttaagagatgatgttttatggcatgatggagtcaaatttagtgctgatgatgtgaaatttagtatagaagcctttaaaaatcctaaaaacaattcttctatttatgtcaattttgaagacattaaaagtgtggaaattttaaatccttctcatgtaaaaatcacactctttaaaccttatcctgcatttttagatgctttaagcataggaatgcttcctaaacatttgcttgaaaatgagaatttaaacacaagctcttttaatcaaaatcctataggtacaggtccttataaatttgtaaaatggaaaaaaggtgaatatgttgaatttaaagccaatgaacatttttatcttgataaggtaaaaactccaagacttattataaaacacatttttgatccttctatagctagtgctgagcttaaaaatggcaagatagacgcagctttaatcgatgtttctttgctaaatatttttaaaaatgatgaaaattttggaattttgcgtgaaaaatcggctgattatcgggctttaatgtttaatttagataatgaatttttaaaagatctaaaagtaagacaagctttaaattacgcagtcgataaagaaagtatagtaaaaaatcttttacatgattatgcttttgtagctaatcaccctttagagcgttcttgggcaaattctaagaattttaaaatttacaaatatgatcctaaaaaagccgaggatttgcttgtgagtgcaggttttaagaaaaataaagatggaaattttgaaaaagatgggaaaattttagaatttgaaatttgggcgatgagcaatgatcctttaagggtaagtttagctggaattttgcaaagcgaatttagaaaaataggagttgtaagcaaggtggtggctaaacctgctggaagttttgattattctaaagtagatagttttttaataggctggggaagtcctttagatcctgattttcacacttttagggtatttgaaagttcgcaagatagtgctttaaatgatgagggttggaattttggacattatcatgataaaaaagtggatatagccttgcaaaaagcaagaaatacttcaaatttagaagagagaaaaaaatattataaagattttatagatgctttgtatgaaaatcctccttttattttcttagcctatcttgattttgctttagtttataataaagatttaaaaggtatcaaaacaaggactttaggtcatcatggagtgggttttacttggaatgtttatgagtggagtaaatag

SEQ ID NO: 1165 - DNA, 1161 bp, Campylobacter jejuni
atgaaatcagcaagaaaaaataaaaacattatcatagatcaaaatgaatttggcatcttatcacttattaaagaaggtttgctaggcacttgcactcatttaatgaatgaaaaagaagtcaatgaaatcattaaatcaggaaaatttaaaggagaaagctttccctatcccttaagctttgcaccaaaaaatgccgaagaagcactaaatgatataaaatctggcgatagaatcgatctcatgctagatgaaaaagtagtaggacatatagattttaaaagccaatttaaaaataataaaaatttttctgatattttcagtcctaacacttgctctttagaagacatgggaacaacttgcataagtggaaaaatagaaatttataattctcaaattgaaaaaataaaagaaaattttcaacaaatcaaaaacaatcttaatgcacaaaaaattactgctatagtttcaagttttgatcctttgcatcgtgcccatgaaagaatgtttcgttggactattgataaagcagatttagttgtaatttttcttgtagaatcttttgatgtaaatgggtttgaattcgaacttaaagaagcatatttgaaaaaatttattcaaaactatcttccaccggatagaattttcatttttccattaaaaaatattaatatttttcacgctcatttaaatcctggcttagaaagtattatcgcaaaaagtctaggttgtaccaaactagtagtaggacaaaatcatacaggacttggaatgttttatgatgataaccaaccaaaaaccatacttgatgatttttccaaggactatggcatagaagtgatcgttttgcctgaatttgtattttgcgatcaatgtcgcatgattgttagcacaagatcttgccctcatggttgtcatcaccatttgcactataattctcagtctttaaaagatttactaagagcgggtatcattcctccagcaattttcatacgcaaggaagtatctagtgttattttaacttctctttttccaaatagattaaaaaatatgcaaaaaatttataatgagctttttccaactgatggaattttagaatacaaaaatgatgaagaattttatcaaaaacttttagaaattcatcaaatgtcttatatggtgtaa

SEQ ID NO: 1166 - DNA, 1011 bp, Campylobacter jejuni
atgtcaaattttaaaatacaaggtaggcaaatgaaagaattttatatgaatttagctttaaatgaggcttggaaatatcagtttttaacctatccaaatccggctgtaggctgtgtaatcttagataaaaatgaaaaaattttagccataaaagctcatgaaaaagctggattagctcatgcggaacttaatgccatagctcatgcttttaaaagcttaagacctgaaatttcattgcccaaagaagcaaacgccttacatgagtttatttgcaaaaaccatcaaggtgtatttaaagatagcatagcttttgtaacgcttgagccttgctctcatcaaggaaaaacacctccttgtgcaaaactctttagcgagctaggttttaaaaaaattttcatcagcgttaaagatgaaaataaaatcgcaagcggtggggctgaatttttaaaaaaacaaggtatagaggttgaatttgacatacttaaagaagaaggaaaaaaacttttaaaaccttttttaaaatggcaaaaagggcaatttaaactttttaaattagccctttctatgaacggctcaccttttggcaaaatcgtaagcaatgagctaagtcgcacttatgcacatgaaattagagcggtgattgatttgcttgtagtcggtggagaaaccataagaaaagattgccctatattagatgctaggctttgcaaagcaaaagcgcctaatctttgtatcttaagccgtcaaaatatagataattttgataaaaatatccctttatttaaagttccaaaccgccaaatttatacccaaattccaagtgaagctaaatttttaatgtatgagggtggagaaaattttctcaaaatctttaaagatgaaatagatatgtttttgattttccaaagttcaagtttaaatgatgaaaaaaatgttacaatacctttaaatttcaagccactttacaggaattttttagggagtgatacttatggcatttatgaactttag

SEQ ID NO: 1167 - DNA, 1089 bp, Campylobacter jejuni
gtgaatacctttggtacgagattgaaatttacaagttttggtgagtctcatggtgtggctgttggatgtattattgatggaatgcctgctggggttaaatttgatgaagaatttttgcaaaatgagcttgataaacgcaaaggcggaagtaaatttgcaacaccaagaaaagaaagcgataaagctcaggttttaagcggggtttttgaaggatatacaacgggtcatcccatagctatagtagtttttaatgaaaatgctcattctaaagattatgataatttaaaagatctatttcgtcctgctcatgcggattttacttatttttataaatatggcataagagatcataggggtgggggtagatcaagcgctagggaaagtgttgctagagtggctggtggtgcagttgcagcgatgcttttgcgtgaatttgatatttgtgttcaaagtggtgtttttggagtaggaacttttgtatcaaatttgaaagaagaagaatttgattttgaatttgctaagaaaagtgaaattttttgccttgatccaaaactagaaagtgactttaaaaatgaaattttaaatgctagaaattcaaaagatagcgtaggcgctgctgtttttacaaaagttagtggtatgcttataggacttggagaagttctttatgataagttagactctaaattagctcatgctttaatgggaattaatgctgttaaagcagttgaaataggcgaaggtattaatgcaagcaaaatgcgcggatcgtgtaataatgatgctttaaaagatggcaagtttttaagcaatcatagcggaggaattttaggaggaatttcaaatggagaaaatcttattttaaaaacttattttaaacctactccttctatttttgccaagcaagaaagtatagataaatttggcaataatttgaaatttgaactcaaaggtaggcatgatccttgtgtaggtgttagaggaagtgttgtagctagtgctatggtacgtttagttttggctgattgtttgcttttgaatgcgagtgcgaatttaaacaatttaaaaaatgcttatggattaaaataa

SEQ ID NO: 1168 - DNA, 663 bp, Campylobacter jejuni
atgaaaactagaattttggcaatattttttatttttacctctcttttatatgctgatgaaaatcctttcaagacagatcaaaatataaccttggttgctccacctgaatttcaaaaagaggaagttaaatttaattctagtgcaagaattttaaaaagcatcacttttaattatatcaatttagacggaagtgaagataagatcgatttagatgtcaataaaagtattgattggcacgatacttatactatatcaagatttaaaagccctgatccttcaaaagtacttgatgtttcagttactatacctgaaaaaaatagctctaaacaagaatcaaactcaacagccaatgttgaaatacctttacaggttgcaaagatttatgattttatttcttatgcggtttataaaaataaaataaaacttaacactagtgatgaaatgattacagatttttcagtaggaaatccaagtaaaatcgttatagattttagatctaaaatgattagccctacaaaaaacatacgccttagcaattctatttttaaacgcatagactttggatctcataaaggatattatcgacttgtaatatatcttgatggaacttataattataatattcaaaaagatgcaactggatatatgattaatctgctttga

SEQ ID NO: 1169 - DNA, 2787 bp, Campylobacter jejuni
ttttttgaaggaaagaataccaacatacaaacctttaataacagtggttttattagtgcaaataagggtgtagatataggcaacataggaaccataaaaaattttaataacaacggaactatacaaggctcagaagtgggagtggctataaatacaaaaatagatacttttactaataatggttttattaattcccctggtagtggacaatggaataatggtatatggataagtagcaatgctaccatagaaaagcttgttaacaatggcacaataaaaggaggacattctgctataatggtaacatctcagcatataaaaactgttgaaaatacaggaattatacatgctgaaggagaatggggttctagtatattattagaatatggtggttttatagagcatataatcaatactggaaccataagtaataataatgttggtataggttcagcttatggagtatttggaacacttaccataaaagatggaggtatggtttatggaaaatactcggcaataggagtgggtcgatcgcaaactctaggagatttatatatagatggacgttcaaataatggcacagtaagtggaatttatagtgaagaacatggaattttattagagaataactcacgaactcaaaaaatagaacttaaaaatggcggcattataaaaggtaatatcgatggtataagattgataaactcggcctctttaagtggagaaatgattttatctggcgaaggttctagggtagaaggtggaagaggtgttggtatattgaatcgaagtggaaaaatagaaggctctataaaagtagaagatggagcaactgttacggctacttcgaatcgagccatagctaactctggctcaggaagtataacaggtggtattactgttagtgggaaaaacactaaacttgaaggaaatataatcaatacaggtaatgcttctataggtagtgatatcaagatagaaggtggagctaaggtagaaggtggtcttgttaatcaaggtaatggaagtatctcaggaagtgttcaagtaagtggtggtagtagtattgattccattaccaatgagggtaatggagctatttctggttcaattactgtatataaagatagtaaacttgattctatcactaacacttctacatcatctacaggtataagtggttctattactaacaatagtgataataaacttgaaatttctaattcaggtaatatcggtggtaagattgaaagtacaggtagtgctgatatggtgattagcaatagtaatggtggaactattagtggcggtattagttcttcaggaagtggaagcactagtatttccaattcacaaggctcaaccataaataacggcatcactgtttcaggatcagcacaagttgaaatctccaatcaaggctcagtaggtaaagatgaaaatggtaatacagtaactaacaatggtagtggtagtgttggaatcaaagattggcttgtttctacagataaaaacacaggtaaattaaacactgtggttataggtggaagtagagcttttaatgtaaaagtagaaaacatcaccgtagatcaaagcaatgttgatcttgaagagctaaacgatataaacaacatcatctcaggtgttaatcaaaacaatattggcaatataggaaccaatggaagtggagaaatatctttaagctttgatccaataacaggaaagcttactacagattttaatcttaatgcttccatatcaggtgcaacctttagatctttaatctctactacttcaagaagatcaacctttatagataatgttatgggtaattctatgcaaagctttgctttagcttcttcaagtaaatctcaaagcatcgctatgtctgaaaagggtaatttatatgcagatgcaagtgattatataaagagtgatttaaataatggaagctatggttctaataaagaacattctttattcatccttccttatacttcttcacagaatgttgaactttctttaaatgaagaaagtaaaggacacactaaaggaaccattataggttattctactttaaaagacagtggaatatatggtgtgtatgcaggttatgaagatacaaaaatgggttcaacttattttgatattaataatagaacctattatgcaggtttaaaatactttaataccttatttactacagaaaaaggtcaagaagtttatatcaaagctcaaggtaaagctgctttgattaaaaatgatttaactgaaaaaataggaaataatgaagctaaagctgaacctaattcttatgcttatggagtcaatacagccttaggtatgaattttatttctaataaagatatattctctcctgaaataggtcttgcttatgaaggaggttatactgaagctttttctatgaaagacaccataggacaagcaacagttaaaggtggagaaagaacctatgcaaactatttaaatcttttctctactaaaacaagtcttacttggtttagagattggttgcctaatttaaaaacttcagtagaacttggagctaagtttaatatcaatcctaaagtagaagctgaggctagatttggtaatataaaagtaagtgatgagtttgatttaccaagagtacaaaaatttgtaagcacttcttttatcgttcctgttaatgaagctttctattttagtttaaactataatggaatgtttgataaagatggcaatacccatacaggatttgctcagtttaattatctttggtaa

SEQ ID NO: 1170 - DNA, 186 bp, Campylobacter jejuni
atggctaaaaaatcaatgattgcaaaagcggcacgcaagcctaaatttaaggttagagcttatacaagatgccaaatttgtgggcgtccgcattcggtttatagagattttggaatttgcagagtttgcttaagaaaaatgggcaatgaaggtttgattccaggtcttaagaaagcaagttggtaa

SEQ ID NO: 1171 - DNA, 1077 bp, Campylobacter jejuni
atgaaaacttataaagtagctgttttagcaggagatggcatagggcctttggtgatgaaagaggctttaaaaattttaacttttatcgcacaaaaatacaattttagttttgaatttaatgaagctaaaataggcggtgcaagtatagatgcttatggagtggctttaagtgatgaaactttaaagctttgtgagcaaagtgatgcgattttatttggttctgtgggtgggcctaaatgggataatttgcccatagatcaaagacctgaaagagcctcgcttttgcctttaagaaagcattttaatttgtttgcaaatttgcgtccttgtaaaatttatgaaagtttaacccatgcttcacctttaaaaaatgagattatccaaaaaggagtggatattttatgtgttagagagcttacaggtgggatttattttggtaagcaggatttaggtaaagaaagtgcgtatgatactgaaatttacactaaaaaagagatagaaaggatagctcgtatcgcttttgaaagtgcaagaataagaaagaaaaaagtccatttaatcgacaaggcgaatgttttagcaagttctattttgtggcgagaagtggtggcaaatgttgcaaaagattatcaagatataaacttagagtacatgtatgtggataatgctgcgatgcagattgtaaaaaatcctagcatttttgatgttatgctttgttcaaatctttttggtgatattttgagtgatgagttagctgccattaatggatctttgggtttgttaagttcagcaagtttgaatgataaaggttttggactttatgagccagcaggtggaagtgcgcctgatatagctcatttaaatatagccaatcccatagctcaaattttaagtgcggctttgatgttaaagtatagtttcaaagaagaacaagccgcacaggatatagaaaatgctatatctttggcattggcacaaggaaaaatgactaaggatttaaatgctaagtcgtatttaaataccgatgaaatgggggattgtattttagaaattttaaaggagaatgacaatggctaa

SEQ ID NO: 1172 - DNA, 2598 bp, Campylobacter jejuni
atgatgagatcactttggtctggcgtaagcggactacaagcacatcaagttgcgatggatgttgaaggtaataacatttcaaatgttaataccactggttttaaatattctcgtgcagattttgggactatgtttagccaaactgtgaaaatcgctacagctccaactgatggaagaggcggatctaatccacttcaaatcggtcttggcgtttcagtaagttctacaactagaattcattctcaaggttcagttcaaaccacagataaaaacactgacgttgctataaatggcgatggtttttttatggtaagcgatgatggtggtcttacaaactatcttacaaggagcggggattttaaactagatgcttatggaaattttgttaataatgcaggttttgttgtccaagggtggaatatcaactgggatgatcaaactatagatagttcaagaactccacaaaatatttttatcgatccaggtatgcatatccctgcagcaaaatctactgaagttgctatcaaagcgaatttaaatagtggtttaaatataggaacttcaagtagaaatctttatgcacttgattctgttcatggatggaatactaaaacccaaagagcagaagatgaaaatgatacaggaactactcagttttatacgacttctaagaattctgtagaagtgacagaaaagggtgtggatgcgggatcactttttaacgcgaaaggacaaggacttaatcttagagatggacaaggaatttgggtatcttatgcagatgcaacatattctaccaataaagtaggagtaaatgcttttgatccaaatttacagcaaaatcaaactgctgctttttggggaacagctaatcaaaaagtgaatttagatataactttaaatggggttagaattcaaaatgctgatattcaaagtattgatgatgctattgcttatatcaatacctttactgcaccaacggatacaagggatggaacaggtgtaaaagcggttaaaaataaggatggtagtggaattgattttgtcaatgataatgccgatggtactacagataatatgaaaaatatcaatcttgtggttgccaataccaatacagcaggtgagctttggaatgctgtatggaataacaacaatcaaacatttacatttaataataatggtaatggacaggctggaacaccgactattaataaaaatggttcttctttgtggacagctacaaatattacatttacaccacaacctcctcaagcagctacgaatgttcagcttactggtggactaaatgcacaaataataacagcacataaatatatttatagttcaaaccctgtggatataggtcctatgtataatcctgacggtggaccagcattccagcctggtgctaatgcaactacaagaccaactgaaccaggttcagcagcttattgggatgctgttaatggtggacttttaaatactaatgtaagaacttttagaaccacagaagatttaagagaacttttacaaagggatgctagatatggggttgattatgatggaagtggaacttttgctgcagctgatattaatcaaaatataaaagtagtagtaacggcagatggacattttgctatttccaatgctaatgaacaatcaactgttccaccaaatgctattaatggtgtaggaaatgccactacaacagatccaaaaaatatgagttttaatataacagcttatagtaacaaacaaggaactgtaagtactaatgatgctttcactgctatttttaaagctttcgatggtcctttggttataggaaatcagatcaaagaaagcgaacaacttaagctttctgctttttcggcggggcttgaaatttatgattctttaggttcaaaacacactttagaagtgcagtttgttaagcaaagtaccactcaagatgggggtaatgaatggcaaatgatcatccgtgtacctgaacctgcagagattaacactacaggcgaaggaccaaacaatatcatcgtaggaacagctagatttaacaatgacggctctttagctagttatacaccaagaacgataaatttctcaccaaacaatggtgccgcaccaaatcaacaaatcaaactttcctttggaacaagtggaagcaatgacggccttgtaagctcaaattctgcttcaactctaacaggacaggcaactgatggttatacttcaggtaacttaaaacctgatgctatccgtgtggatgataaaggtaatatcttaggtgaatttactaatggcaaaacctttgctgtagcaaaaatcgcaatggcttcagtggcaaataactcaggtcttgaggaaattggtggaaatctttttaaagttactgcaaatagtggtaatatcgtggtaggtgaagcaggaacaggaggtcgtggtgagatgaaaacctcagctcttgaaatgtcaaatgtggatttaagtcgttctttaacagagcttattatcattcaaagaggttatcaagcaaactcaaaaaccatttcaacgagtgatcaaatgctccaaactctaatccagcttaaacaataa

SEQ ID NO: 1173 - DNA, 141 bp, Campylobacter jejuni
gtaaagatgcttataaaatcaaagctaaagatgcaaaagattatatctttggctatactattatcaatgaaatttcagctcgcgaacttcaaaaacgccacaaacaattctaccgagcaaaaagtcttgaaggtagcacta

SEQ ID NO: 1174 - DNA, 36 bp, Campylobacter jejuni
aaaaaagcgaacaccataatgaaaaatggttttggt

SEQ ID NO: 1175 - DNA, 39 bp, Campylobacter jejuni
caatcaatcaattcaccactcaagccgatcttagcaaac

SEQ ID NO: 1176 - DNA, 69 bp, Campylobacter jejuni
tcaagctttgctttggagcgtggcagttttggctattttgggacactgtttttcaatttacttgttatt

SEQ ID NO: 1177 - DNA, 33 bp, Campylobacter jejuni
gtattggttttggaaagagtgcggggcataata

SEQ ID NO: 1178 - DNA, 96 bp, Campylobacter jejuni
gttgtgggctttgtgaactggcttgtattactgaaaaaccggccattcgtgttttgccaagggagtatgtattgggaaaagcaggatctcattatg

SEQ ID NO: 1179 - DNA, 159 bp, Campylobacter jejuni
ccttacgccgtgcaaatacaggggaaattgctaatatacttgattatatccctaaaaatatcacacttttacccaacacttcaggcgcaagaaacgccgatgaagccttacgcattgcaaggctttcaagagagcttggttgtggagaacttatcaaaa

SEQ ID NO: 1180 - DNA, 63 bp, Campylobacter jejuni
ttgtgcaagtttgatggcaaaatacgaagctccagagccagagtcaaaaacaatgaaacaagt

SEQ ID NO: 1181 - DNA, 72 bp, Campylobacter jejuni
tactatgggggggggtataccaattatcatgatagggggttctcacgggggatatttagcgcatttggcagc

SEQ ID NO: 1182 - DNA, 60 bp, Campylobacter jejuni
aacttgatagaaaaagcggagataatatactcaaaaaacttacccaaaaaggcttggttg

SEQ ID NO: 1183 - DNA, 90 bp, Campylobacter jejuni
atgcaagcttgtttaatggctatgcttgggagagcgtttcttctcatgcgtggcgtgaaagaaatcgcaaaaaatgggcaaggattgtta

SEQ ID NO: 1184 - DNA, 102 bp, Campylobacter jejuni
tgcgattttggatttgcacgaacaaagaaaaaaagattctcttttggtggttacgggttgtttgatgcagcgttaccgcgaagaacttatgaaagaacttcc

SEQ ID NO: 1185 - DNA, 66 bp, Campylobacter jejuni
tggagtgcgtggaatttgggatgggaaatatctaaaaactcgccaaaactacaaaataaaaactcc

SEQ ID NO: 1186 - DNA, 411 bp, Campylobacter jejuni
gcgtttataatgctttctctaagcactgctaaaacacctttgaattcattaaaagtacagatcaaaattccttctttaaaatgcgttttttctttatcttttggcatagtctttgtgatcaaaaccgctatatcactttttgcggctatgctgtctagcttaagcttatcaagccattctttattaaattctttagtgcgtttgctctcatacaaaatacttccgcaaatatttccaaaattatcctttactatatgcagacaatcggctccatttacgccttttggcacttcttttacttcatcgcttaaatactcactttgtatgtattcttctatgagtagttcggctgcttcgccttggagttgctgtgagccttgttctatcctgcgttgtgcgtcttctagcttt

SEQ ID NO: 1187 - DNA, 105 bp, Campylobacter jejuni
tttggatttttccaaggtccgtattttacttttatgtattctttagggtctaaattttgttgcggtgaggcaaaatactcaggttttaatgatggggatttgcta

SEQ ID NO: 1188 - DNA, 93 bp, Campylobacter jejuni
tttctaacatcatctttccttgtgattttatccatccaaacaacaaccattaaagaaagaaaaacgataaacaaggaaggcaaagctgcatca

SEQ ID NO: 1189 - DNA, 108 bp, Campylobacter jejuni
ggattgtctagcaatttaagagctagaataagaccaaaaaccgctccaacaagccccatggtagggcaagtttctccaaatactatccaatattctgcgcattcttta

SEQ ID NO: 1190 - DNA, 153 bp, Campylobacter jejuni
tttgtaaaagccttaagatttaatttttcaaaaaataaatcaagctctaaaatacttttaaataaaagctccttaaaatctttcaaaaagtactcatcacttgcattgcaaaaagctcttaattcactaaaatttttatcactttggaaaatg

SEQ ID NO: 1191 - DNA, 237 bp, Campylobacter jejuni
atcgtagcaccgcgttttttagcctcttcatattcctcaaaaactaaagctccagcaccttctcccatgacaaaaccatctctttctttgtcaaatggtcttgaagcatgctgtggatcttcatttctagttgataaagctttcattgaagcaaaaccacctatacccacaggacaaatcgcagcttctgcacctatgactaacatctttttagcatttcccaaagctatactttta

SEQ ID NO: 1192 - DNA, 321 bp, Campylobacter jejuni
ttaaaaagtttttcatcgtttttttgcttggcttttaaaagtctgtgcaaaataagatcagaataccttcttatagggcttgtaaaatgtgagtatttatcaaaacctaagccaaaatgtcccgcattgacgctagaatattccgcttttttttgtgctttgatgatgagtttatctacttctgctcttaaatttaactcatcagctaaagcttgtatgtcgcgtatgagctcaggaagattgggcttaaaatttacatcgatgcctaattcgcgtaattcatttaaaagcttatcgatttttcttacatcagcacttaag

SEQ ID NO: 1193 - DNA, 372 bp, Campylobacter jejuni
tcaaaaaaaggaaaaagatttaaagaaaaagctatgggatataagaacataaatacaagtccaaaaatcaccaccgtacctacagctaaaattcccttaaaaggatcacttttcaaacttgactctagtgctaaaaccgctgccgcaccgcaaatcgcacttccagctccaacaagcatagaagtttctttatcgagtttaaaaattttcgttcccacaaataaagcaataataaaaacaaaaaatatcactatagcagaaagcaaaaatcctttcaatcctacacttaaaagctcagttaaagtgatattaaaaccatataaaacaatgccaagtcttaaaagttttttcgcactaaaatgcactccggct

SEQ ID NO: 1194 - DNA, 81 bp, Campylobacter jejuni
aaaatactttgtaaaacaacaggatccccaacgatcaaaatgctatcatttggctctagaacaaaagatggttttacaaaa

SEQ ID NO: 1195 - DNA, 159 bp, Campylobacter jejuni
ttttcaatcactgcgatttttaattttttatttgcatttaaatttggaacggttttgataaactcgatatttgcacttgtgctatccattttgtcatatcctgcgatcgcatcatataaaattgccgcatcttctacattttgcgttaaaaccccgatt

SEQ ID NO: 1196 - DNA, 138 bp, Campylobacter jejuni
tttttaactaaagttgctccaccacctaaaatactatcatctgccaaacttaaattaggcaaaacacaagaattaatccctaaaaaacaatttttaccaatttttacattacccgcacatttagctcccacactcaca

SEQ ID NO: 1197 - DNA, 207 bp, Campylobacter jejuni
attttatccttagcaccccctttagctctatgtgcttttgcatcgattttttcttttgaaatagctaaaatatcgacatttaccccactacttacaatgatttctttagccaaatcaagcaaagcctttcccccatctataagccataaatcaggaggaggtattttatcaaagtccaaagccctacgcgttaaaacttcacgcatt

SEQ ID NO: 1198 - DNA, 141 bp, Campylobacter jejuni
atcgtcacaaaagaacaagcgatcaaaaaagccaccacatcaaaaaccgcactaatgctaaaaaattcagccacaaagccaccaaacaaaggcccaagtaaacttccacttatagaagccgtagaaagagttcctaaagca

SEQ ID NO: 1199 - DNA, 161 bp, Campylobacter jejuni
ctgttccgtgctgatcatcatgcattacaggaattcctaaatcttgcaaagccgcttcaatttcaaaacattttggagcagctatatcttctaaatttatcccgcccacagtcggagccaaagccttgcaaaaatttacaatctcttctatactatgaaca

SEQ ID NO: 1200 - DNA, 123 bp, Campylobacter jejuni
gaatctataaaaccacttacatataaagctcctggtaaacccattaaaagccaaccactcatatcagaagcccctgcgctaagtgcagatatcacaggccccatagtacgcccacctagaaaa

SEQ ID NO: 1201 - DNA, 138 bp, Campylobacter jejuni
aataaattaatctttgctatacctaaaagaattaaaaactctcccacaaaagaaacagttaaaggcaaagaaacactcgcaagtaaaatgagcataaagaaaattgaaaataaaggtgcttttttggctaaagaatgg

SEQ ID NO: 1202 - DNA, 225 bp, Campylobacter jejuni
atttcttaccttcaagatcttataccccaaattttttgtaaaaaattacccaaccataaaagaggtaaaaacaacaaaagcaagcttaaaagtggaaaaagtatcatccaccaagcgcctataaaaactgcttttgaagattcactcaaaagagtacctaaagttggaatttcaaatcctaaacccagcccaaaaaaactcaaagtagcttctgtggctatagca

SEQ ID NO: 1203 - protein, 412 aa, Campylobacter jejuni
MKQNDQKENRRDFLKNIGLGLFGISVLSNFSFENFLGSKALAKELPDFKIEGKKDLIYHGEKPLTAETEIYALDSDFTKPENFFVRNNGLPPSLETIKERLHKGWTLEIDGESIINKKSYTIEDLKKKFKTYTYALTVECGGNGRSEVIPSTKGTQWGYGAVACGRWTGVRLKDILKDCGIKNDAVYIGYYGIDTKLNGEETSPISRGVPISKALQDETLIAWAYEGKDIPLVNGYPLRLVCGGYPASTSGKWLYKISVRNKIHDGEKMEGSYKVPVNPVKPGDFNYKGEMKIIESMPIRSVITNIKNGSEIKANKKFEVRGKAWAGELEVSEVYVSNDYGVTWTKAKVEKPLNRLAWQKWSAQISIPTKGYYEIWARAIDSQGNSQPMVLAQWNPGGYINNACHRVNVYGV

SEQ ID NO: 1204 - protein, 1496 aa, Campylobacter jejuni
MDLENILENNQSIGLYHPKNEHDACGIAAVANIRGIASYKVICDALEILMNLEHRGGTGAEENSGDGAGILIQIPHDFFKTQELGFELPKKGDYAVAQMFLSPNTDAKEEAKEIFLQGLKDKKLEFLGFREVPFNPSDIGASALKAMPYFLQAFVKKPSKISAGLEFERVLYSTRRLIEKRAINVPKFYFSSFSSRTIVYKGMLLSTQLSDFYLDFKDVNMKSAIALVHSRFSTNTFPSWERAHPNRYMVHNGEINTIRGNVDSIRAREGLMQSEYFENLDEIFPIIAKLSSDSAMFDNTLEFLALNGRTLEEAFMMMVPEPWHKNENMESKKRAFYEYHSLLMEPWDGPAAIVFTDGVIMGASLDRNGFRPSRYYLTKDDMLILSSETGALKLDEKNIKAKKRLEPGKLLLVDTARGRVIADNEIKEHYANAKPYKKWLKNLVELEKQKSGVYKHQFLKEDEVLKLQKAFGWSYDELKMSVAAMAQNGKEAIAAMGVDTPLAILSKTYQPLYNYFKQLFAQVTNPPLDAIREEIVTSTRIYLGSEGNLLKPDENNAKRVKIALPVISNEELFEVKALNKFQVKEFSILYDYSKKTLEKALDELCVKIEDEVKKGVSIIILSDKGVDEKNAYIPALLAVSGVHNHLVRKNLRTHTSLIIESGEPREIHHFACLLGYGATVINPYLVYESIQKLIANKDLNLSYEKAVENFIKASSSGIVKIASKMGVSTLQSYNGSALFECLGLSSKVIDKYFTSTTSRIEGMDLEDFEKELIALHKHAFNDTHKALDSKGIHGFRSAKEEHLIDPLVIFNLQQACRNKDYKSFKKYSALVDEKQVNLRSLMEFDFSEAISIDKVESVESIVKRFRTGAMSYGSISKEAHECLAQAMNKIGAKSNSGEGGEDEERYEIKEGVDKNSAIKQVASGRFGVDLNYLSHAKEIQIKVAQGAKPGEGGQLMGFKVYPWIAKARHSTAGVTLISPPPHHDIYSIEDLAQLIYDLKHANKDAKISVKLVSENGIGTVAAGVAKAGANLILVSGYDGGTGASPRTSIPHAGIPWELGLAETHQTLILNKLRDRVRLETDGKLMNGRDLAIAALLGAEEFGFATAPLIVLGCTMMRVCHLNTCPFGIATQDTELRDRFKGKVDDVINFMYFIAEELREYMARLGFERLDDMIGRVDKLRQKSVQGKAGKLNLDKILKSLPTYNRTAVHFKDYKDNKLEKTIDYRILLPLCKNAVEKKEPIKLSLEVGNQSRTFATMLSSEILKTYGKDALDEDSIHIKAIGNAGNSFGAFLLKGIKLEIIGDSNDYLGKGLSGGKIIAKISNEATFSPEENIIAGNACLYGATKGEVYLDGIAGERFCVRNSGALAVVLGTGVHGCEYMTGGQVVVLGDVGANFAAGMSGGVVYIFGRHNEAHVNTELVDIKDLNAKDEKELKAVIEKHITYTDSKKAKDILEKFDKKDFFKVMPRDYEKMLKMLDLCKNEKDPNLAAFLKITQK

SEQ ID NO: 1205 - protein, 331 aa, Campylobacter jejuni
MKKAKSRIAILGTGGTIAGFIDSTIATTGYAAGAIDIDVLIKAVPQIRDLADISWEQIANIDSSNMCDEIWLRLAKKIAKLFAEGIDGVVITHGTDTMEETAYFLNLTIKSDKPVVLVGAMRPSTAISADGPKNLYNAVALVVNKEAKNKGVMVAINDKILSARGVVKTHSLNVDAFSSPDFGDLGYIVDGKVFFYNNVIKAHTKNAPFDVSKLTSLPKVDILYSYSNDGSGVAAKALFEHGTKGIVVAGSGAGSIHKNQKDVLKELLKKGLKVVVSSRVVAGCVAVSDSDEKLGFISAEDLNPQKARVLLMLALTKTSDPKKIQEYFLKY

SEQ ID NO: 1206 - protein, 347 aa, Campylobacter jejuni
MKKHILLLGLCLSLSLSAKSVSDYKVGEELSDKEGVEYFKELSKRPVQEWPNKNLSINDVPKGKQGDLIRYGIELLSKTESTLGPYSKLKKTSNEVNCISCHMDNDGNGLPGTKKYVIPFLNILNNYPRLDIETMKIISVEDRIRGMGGTDSHRFPNDSKEMKAILAYFKWLKEAYGIKDGVKLEGDFFAKMNFPNRPADPVRGKKLFEENCVACHGERGLGVKNDNYEQGSGHLYPSLLIYPDGGHMAMIPFLARFLKSAMPFGASADNPILSDEDALDIAAYVNTGFVRMPITTTENRAGLDTAYSKSPSLKPEYFASPQQNLDPKEYIKVKYGPWKNPNHFPGE

SEQ ID NO: 1207 - protein, 268 aa, Campylobacter jejuni
MQKIIVFILCCFMTFFLYACSSKFENVNPLGRSFGEFEDTDPLKLGLEPTFPTNQEIPSLISGADLVPITPITPPLTRTSNSANNNAANGINPRFKDEAFNDVLIFENRPAVSDFLTILGPSGAALTVWALAQGNWIWGYTLIDSKGFGDARVWQLLLYPNDFAMIKNAKTNTCLNAYGNGIVHYPCDASNHAQMWKLIPMSNTAVQIKNLGNGKCIQAPITNLYGDFHKVFKIFTVECAKKDNFDQQWFLTTPPFTAKPLYRQGEVR

SEQ ID NO: 1208 - protein, 400 aa, Campylobacter jejuni
MKIIKILFLGLFLSLSLNAKVITTTSTKSSTGEGTGLTREDAINNAIIEAIGKMSGVSINSLKKSNTSVSTDNSGSNIQDNYSEQISKATKGRADTYEINSVEQDANGKYTANVTIFKTTTTKKYQAPGLSADNRRSITVFDSTPDAAKRGIGSALQQKIISDLLQSRKFNVLDRDSSGYYEMEKALIKSGDAASDEVYKLKNMLATDYILLFSISGLEGKQKTSNLTGKSKTEIEVIVDYRVLLFATRQIKFSNTLSMKVNLKDNSLSANETALKQIANRIAGDILNAIYPLKVASVENNEVIFSQSLNQGDVYECFALGKVIKDTYTKENTGRVESKTGSIEITRTSPKFSYAKITEGSVKVGDICRPLSNTGSGNGYTIGRDANYQTQEGGGVNLGF

SEQ ID NO: 1209 - protein, 165 aa, Campylobacter jejuni
MKKILFTSIAALAVVISGCSTKSTSVSGDSSVDSNRGSGGSDGWDIDSKISQLNDTLNKVYFDFDKFNIRPDMQNVVSTNANIFNTEVSGVSITVEGNCDEWGTDEYNQALGLKRAKAVKEALIAKGVNADRIAVKSYGETNPVCTEKTKACDAQNRRAEFKLSR

SEQ ID NO: 1210 - protein, 292 aa, Campylobacter jejuni
LKILVPATSANLGPGFDCLGLSLKLFNETQIQKSGVFSISIGGEGSDNIFLKKNNIFVNIFYEIYEKLSGKKDNFRFIFQNNIPLSRGLGSSSAVIVGAIASAYYMSGFKVEKECILDEALIYENHPDNIAPATLGGFVCSLVEKNKVYSIKKEIDKDLAAVVVIPNLAMSTEQSRQALAKNLSFNDAVFNLSHASFLTACFLEKKYEFLKFASQDKLHEINRMKNLPELFEVQKFALENKALMSTLSGSGSSFFSLAFKDDALALAKKIQTKFKDFRVQYLEFDDNGFEIC

SEQ ID NO: 1211 - protein, 296 aa, Campylobacter jejuni
LKKIILFILSLGIFYTFTQAKNLEQEQNTSSNLVSVSIAPQAFFVKKIAANTLDVNVILPPNSNEHNFEFKPSTMKKLEKSDIYFTIGLEFEKVFTDKFKQNFPKLQVINMQKNIALIQTHDTHEHSHEHEHHEHGHFDPHTWLDPILVQTMALNIYDTLIQKYPQNENLYKENLDKFLAELDSLNLQIASKLEKLKNREFVVYHPSWTYFAKRYNLTQIPVEILGKEPKSKDLQKLITLMKDKNLKVIFVQNGFPENAAKTLAKECDAKIYKIDHLSYDWENELLKTADAFSHNL

SEQ ID NO: 1212 - protein, 141 aa, Campylobacter jejuni
MQKAKILIALSFFLLVLSACSNDEKNISKTQNTDQEVVQIEQNDEKTELSDSNLPLPVDDEAQSSNDEHEVNPSIINSLYKQKCATCHGEKGELKPKNSTAIKTLSNKIFIQKIKTIKDKNHSFLSDEQIQNLADFINKGK

SEQ ID NO: 1213 - protein, 755 aa, Campylobacter jejuni
MKKLSLFCAVGLCFASFAFSEELEFDSLEISGSKIKNDEKPFVTPGATSTREGIGSDTQSIDSIVRSIPGTYTNTDQAQGTVQVNIRGMSGFGRVNTMIDGVTQTFYGSASDDPARFHSQTGTSAFGAVIDTNFLIGVDVTRGTFEGVGGANALMGSANFKTIGINDIVHDGNIFGFLGRFSYGSNGIGPSYMSAVAGKTELENNGYVGALFGYSAKRITQNYTVGGGGKIGSSMVDTDGDGIADTNIAPFDPDFLTQKPNSQLFKLEYVPNSFTNTIFSYRRYQNELAGRKIHNDNYQLDFWHNPNEWLNVNTLIAYNQGIQTYGSKSTFAANDAIANTKAKNTATTFDISDTLEGEWHRFNLNIRFGANILLNDYKNTLNTSIQGVNSIPFQPRGKQNLFTYYLDNSLNYGIFTLDTNVNLLDWNIKGHRPACDEVNFMCFPKAATDIDKNGLRLNASVMLSAAIHELITPFVSFARTNRAPNVQEMFFSNNEGNGINSFLKPEQANTWQIGFNSFKHGLLKDDDRFGFKAVYYHTKIKDYIYNEQFYLEDPSKDPPSSQFYMHLNSADDTIFKGVELELSYDLGFAYAKAMYSRQDTSSTISQTSGPLLGSFSASKIMELPKDYANVELGFRLNDKISFGGIAKYTGKAKRVNPNTDDWNKDPNNPYYPKPTTQDLPKIPIIVDLYWNIEWFKNLTMRAEVQNLFDKNYMDALNAYNSLDNQLQYNGAGDPIYLFSNSARGRTFIVSFEYKY

SEQ ID NO: 1214 - protein, 248 aa, Campylobacter jejuni
MKSSVIFGFVLSLILHTLVLMFFLFSFYTQEKSSGVDFKQGAEFTSIMMVSEFPIGELKEVSIDQKKSNSQDKNKKQDERISFNSQDKNAVLKVQKKIEKQDENQAQKEIANASENSKFKNESLSAPLQSNKDKTQTIVSGNAKEQVKSYQALLMAHLTKFKKYPQEAIMQKQEGVVRIRVSIDESGNVLSKELKKSCPYAALNDEALSLFKRASPLPKPPKEMLKNGDKISFVMPIDYNIKDYLGKK

SEQ ID NO: 1215 - protein, 838 aa, Campylobacter jejuni
MLDRRKFLKIGASLSALPLIPSLSAGKTVEASKVSLGLVKNGEVITAAHWGILKLTIKDGKIVKSEPWEKVTKMDNPLQHYTADMVYKSRVKYPYVRKSYLENPDNPKPELRGKDEFVRVSYDEAIKLIAKELKKTRDSKGASAIFGGSYGWKSSGNMQNSRILLHRFLNVTGGFVGATGDYSTGASQVIMPYVVGSIEVYEQQTSWENILSDSKYVVIWGADPLSTLRIAWTSNEQRGLAYFEKLKDSKIKVICIDPVKTTTAKFLNAKWIAPRPNTDVALMMGMASHLIAKKKVNYEFLDTYTTGFDKFKDYLEGKEDGVKKDTKWASKICGIDEKTIKNLAETFYDNSTMIMSGWGMQRAHHGEQPHWMLVTLCAMLGQIGTKGGGFGLSYHYSNGGVPTCKGGVIGGMTAGSLGIWKNGKFKGLSKAEASSEGAEWLQNAASYSFPVARIADALLHPGKTIDHNGAKITYPDIDFIYWVGGNPLVHHQNTNTNVKAWRKPRTVVVNEIYWTPTAKMADIVMPVTSSYERDDITMTGDYSNMHIAPMKQAVEPVGESKDDYVIFSDICKIYGKDVFNAYTENGKKAKDFIKEYYNSALKQTQSFGEAFATPMPSFEEFWAKNEPITFEPTAESLEWTRFSEFIEDPILNALGTDSGLIEIYSETIKNYNYDDCKAHPTWFEPIEWLGNASKEAPFHLLTNHPRDRLHSQLCHTSLRDTYAIKDREPILINSKDAKKLGIKNGDVVRVFNKRGEVLAGAVVSDEIMQGVVRLCEGAWYDPNENGLCKCGNANVLTMDIPTSKLANGNISHTGLVNIEKFKGELPKLTAFSAPKGAN

SEQ ID NO: 1216 - protein, 325 aa, Campylobacter jejuni
MKNFSLWCDFIENSFLDNEFLNLLSHGINGATSNPAIFKNAILNSPIYKDKILKLKEKKTKDIYEELAISDIQKAADKLAPLFYQKNDGFISIEIDPRLHDNTTLSLGEAKRLYSAIGKENIMIKIPATKASYEVMYELMKNGISVNATLIFSLEQSQKCFEALNAGLVEFRKNNIALKEQNTRTPQAVISIFVSRFDRLLNPKAKEQNRIGILNANLAYNNIYSKNEPNIRALFASTGVKGDDLPKDYYIKELLFENSVNTAPLDAIEAFKGKMHFKKPLMNFEIYTELNQIISQSEREKACNDLLSDGLEQFCIAFEDILKAL

SEQ ID NO: 1217 - protein, 318 aa, Campylobacter jejuni
MFDENIVKTGSNEMELVDFRIFKQGHDKVYEGIYGVNVSKVREIIKIPSLTELPGVPDYIEGIFDLRGVVIPVVNLAKWMQITEPESTMLKPRVIITEFSNILIGFIVHEAKRIRRINWKDIEPATFSTGSGALDKGKITGVTRIENDEVLLILDLESVVEDLGIYAPKTDIDFGKIEKFTGTALILDDSMTARKRVKEMMQQMGFQVVEAKDGVEGINKLEELSQIYGESLNDTLKIIVSDVEMPQMDGFHFAARIKEDPRFKDIPIVFNSSLSNEFMNEKGVQEAGGEGYLVKFNASDFFNEIAKVIKKHQSQEQG

SEQ ID NO: 1218 - protein, 282 aa, Campylobacter jejuni
MQVITSVKEAKQIVKDWKSHQLSIGYVPTMGFLHDGHLSLVKHAKTQDKVIVSIFVNPMQFGPNEDFSSYPRDLERDIKMCQDNGVDMVFIPDATQMYLKNFSTYVDMNTITDKLCGAKRPGHFRGVCTVLTKFFNILNPDIVYMGQKDAQQCVVVRHMVDDLNFDLKIQICPIIREEDGLAKSSRNVYLSKEERKASLAISQSIFLAEKLVREGEKNTSKIIQAMKDILEKEKLIKIDYIELVDFNTMENIENITDNVLGAVAAFVGKTRLIDNFLVQGLK

SEQ ID NO: 1219 - protein, 332 aa, Campylobacter jejuni
MKKIFLTLFCLIFLCACGTKRQYFEPKQTDGDLSHNSNLKSKIVDWNLVSAKLSNNTTILKNNISIDKFKLPKNYMLLAYQDGEYFTADNNGNLKIFDNSYNEIYNFQFDASVVGVASNGDDLALVLANNTIVLANRSLGIKFSQTLTSAPAQDSRTANPIFLDNIIVYPTLDGKILILSRNNLQIIKDVVISAENFFNNVIHLSVIGDKLIAATAKKIIVVSPARTLYLDADIKDVALSDDGIFILEKDGTIIKTDYNLRKIAEKKFEFAIFVKSNIYNNYLYIFEKTGYLIKMNLNLDNAQVFKLSEAVDKISFMGNGKFYYGDKILDLL

SEQ ID NO: 1220 - protein, 299 aa, Campylobacter jejuni
MKKYILLASSMLILAACGGTSSNFVNVSMPNFKPQVPTKVEPIDSGVSIALVPINIEQNNNYSDYFENSVLKIRIEKEIDLLKQNLEEQIKTIAQLKGYKIVTTNPDYTLKSSISIYTEEKNVQKTSNFMSGDYVKSNLGINFKGKIDFIDAHNPQNSTNLSSSTKLDSLVALNYPIKNDDGVNMFKTTISTVPTQLNKGLEQPAFEIDKSFLAFYKNTLNTLYNNLPKATDIGKTIPNTNSGFNSFDGDATFEESLPQTNSNQNNTIENAPTQNIPTNPSSTNQNNQSKNQDGVEIFE

SEQ ID NO: 1221 - protein, 573 aa, Campylobacter jejuni
MAEVLKKVDVVTVGAGWTGGIVAAELTKAGLNVLSLERGHMQSTENFNYIHDEWRYGINYGLMQDCSKDTVTFRHDPSGLALPYRKMGSFLLGNNVGGAGVHWNGWTFRFMPYDFEIQTLSKQRYGNKLGNDYTLQDWGVTYKDMEPYYDRFEKTCGVSGEPNPLAEKMGAFRSSPYPQEPLENTKMLKRFESAAKSSNLHTYRLPASNSKGGYTNPDGQDLAPCQYCAYCERFGCEYGAKASPLNTVIPKAMSTGKYTIRTYSNVTQILKKDGKVTGVKFVDTRTMKEYIQPADIVVLTSYMFNNAKLLMVSNIGEQYDPKTGKGTLGRNYCYQMNMGTTAFFDEQFNTFMGSGALGTTSDDFNGDNFDHSKEKFLHGAMIYSVQLGTRPIQSAPLPAGAPTWGAEFKKALNYNFTRAITVGGQGASLPHKNNYLSLDPTYKDAFGMPLLRLTYNFTDQDRALHKFITDKTAEVAKRMQGVKSIKKGAYLKDYSVVPYQSTHNTGGTTMGADRETSVVNTYLQHWDADNLFVVGAGNFQHNSGYNPTDTVGALAYRCAEGILKYHKSGKSLA

SEQ ID NO: 1222 - protein, 402 aa, Campylobacter jejuni
MKISLFGYGKTTRAIAENLVDKFGPFDIYDDHFTETKKDTLGNLLLNPNDFDDNLSDIEIPSPGFPPKHKLIQKAKNLQSEYDFFYDIMPKSVWISGTNGKTTTTQMATHLLSHIGAVMGGNVGTPLAELNPYAKLWILETSSFTLHYTHKAKPEIYALLPISPDHLSWHGSFDNYVQDKLSVLKRMNECDVVILPKIYANTPTKAHKISYEDEKDLAVKFGIDTEKISFKSPFLLDAIMALAIEKILLDTLSYKLLNSFVMEKNKLEELKDSQNRLWVNDTKATNESAVMAALSRYKDKKIHLIIGGDDKGVDLSNLFDFMKGFDIELYAIGISTEKMLDYAKKANLKAYKCEVLSKAVNEISNHLRVNEVALLSPACASLDQFNSYAERGKVFKECVNKI

SEQ ID NO: 1223 - protein, 365 aa, Campylobacter jejuni
MFGSKINHSDLQKLEEENKNLTHKIEKFQSENLELKNKITSLEQAALESKLKTDLLNVLLTGVLKNITIIQGDMLENVNKAEVISSYSKTSLAEMDELNHIANSINASLGNITESANKTRDVAGTLHRSVDEITNVINLIKDVSDQTNLLALNAAIEAARAGEHGRGFAVVADEVRKLAEKTQKATTEVEMNINLLKQNANEMYTQSEQVEKISIDSNAHIMSFSEKFTHLVNEAHSTNSNAVGIASEAFVSLAKLDHIAFKLNGYKEIFSKSGKQLADHTSCRLGKWLASTGKERFGQNKSFLKINEPHEKVHENMNNAITIANTEDISKDITQHSIINKCEVAENASLDLFNVFKEMLDESDH

SEQ ID NO: 1224 - protein, 357 aa, Campylobacter jejuni
MNFINLQAQYLAYKDEINAEIESVLSSSSFIGGAKLNEFEQNLAHFLGVKHAIGCSSGTSALYLALRVLDIGKDDEVIVPSFTFIATAEVVALVGAKPVFADINLSNYNLDFKAVQKAITSKTKAVIAVSMFGQMSDLRALEEILKDKNITLIEDGAQSFGASFKGEKSCSIAKISCTSFFPSKPLGAYGDGGAIFCHDDEIAKKIRILLNHGQTQRYKHEFIGINGRLDTLQAAILNVKLKYLEKELDKRQKLAQIYNANLKNCQIPQINPNAFSAYAQYSVLVEDRASVLRKFEKANIPYAIHYPTPLHKQPCFSEFSNLELKNSEYASEHILSLPFSPFLSEEEQEQVICIFKD

SEQ ID NO: 1225 - protein, 569 aa, Campylobacter jejuni
MMRFTKFYAPSLKEAPKDASLPSHIFLTRAGFVEQIGSGLYNFLPLGKRVLDKIKNIVKEEMDKAGAQEVNLSFITPASLWQESGRYNVFGKELLRFKDRKENEFVLGPTHEEAMLSLVKNKITSYKQLPLHLYQIGLKFRDEARPRFGLLRCREFLMKDGYSFHANEEDLGREFELMYKTYSQILQRMGLDFRAVEADSGAIGGSGSKEFMVLAKNGEDDILICENCDYAANVEAAKRAKKTCQDERPEANYASKFHTPNIKTIDSLAQFFKINAFYTIKAVVKKAIYENESKLVVFFIRGSDDLQEVKAQNTCSALELVDASEEELKKAGLVAGFIGFVGLKDIDFYIDFELENEKQMIMGANEKDYHLIGIDVVNLNKDRFKDLIEVKEGDCCVKCGAKLKQSKGIEVGHIFKLGQKYSKAMNANFLDENGKSQPFYMGCYGIGVSRLLAVAIEANHDEKGCIWNKTLAPFVLEIIVSNLKDEKALEFANKLYRDLTNLGLEVLLDDRNERFGVKMNDFELMGFPYALVIGKGLENNEIELIQREGLVKELIKTDELMEILKKKVL

SEQ ID NO: 1226 - protein, 642 aa, Campylobacter jejuni
MAFGSLSSLGFGSGVLTQDTIDKLKEAEQKARIDPYTKKIEENTTKQKDLTEIKTKLLSFQTAVSSLADATVFAKRKVVGSISDNPPASLTVNSGVALQSMNINVTQLAQKDVYQSKGLANDGGFVNAQLNGTADLTFFSNGKEYTVTVDKNTTYRDLADKINEASGGEIVAKIVNTGEKGTPYRLTLTSKETGEDSAISFYAGKKDSNGKYQKDINAEKIFDDLGWGLDVSASIDPDKDKKGYGIKDASLHIQTAQNAEFTLDGIKMFRSSNTVTDLGVGMTLTLNKTGEINFDVQQDFEGVTKAMQDLVDAYNDLVTNLNAATDYNSETGTKGTLQGISEVNSIRSSILADLFDSQVVDGTTEDANGNKVNTKVMLSMQDFGLSLNDAGTLSFDSSKFEQKVKEDPDSTESFFSNITKYEDINHTGEVIKTGSLSKYLNSNGGNTNGLEFKPGDFTIVFNNQTYDLSKNSDGTNFKLTGKTEEELLQNLANHINSKGIEGLKVKVESYNQNNVTGFRLNFSGDGSSDFSIKGDANILKELGLSDVNITSKPIEGKGIFSKLKATLQEMTGKDGSITKYDESLTNDIKSLNTSKDSTQAMIDTRYDTMANQWLQYESILNKLNQQLNTVTNMINAANNSNN

SEQ ID NO: 1227 - protein, 273 aa, Campylobacter jejuni
MKKFSLVAATLIAGVVLNVNAATVATVNGKSISDTEVSEFFAPMLRGQDFKTLPDNQKKALIQQYIMQDLILQDAKKQNLEKDPLYTKELDRAKDAILVNVYQEKILNTIKIDAAKVKAFYDQNKDKYVKPARVQAKHILVATEKEAKDIINELKGLKGKELDAKFSELAKEKSIDPGSKNQGGELGWFDQSTMVKPFTDAAFALKNGTITTTPVKTNFGYHVILKENSQAKGQIKFDEVKQGIENGLKFEEFKKVINQKGQDLLNSAKVEYK

SEQ ID NO: 1228 - protein, 317 aa, Campylobacter jejuni
MKNESKEDSNFWIAYADLMAGLLFVFILLIGAIVVKYVLTQSDLKEIKDNLNKQEARLEESKEELRNKEAIVFKLSSDLNNASSALNLANSQKAELEANITNYKQLSKDLNSTLDNKDKQILILLGQLEKKDEELKNLQEDFQKAKEKVQNLGLIRENLSKELQSKLDNNITIDEKIGSISLPAEVLFDKDSYVLKNEAKASLRKILSEYFDAILEDPKIFSNIENIIIEGHTDSDGSYIYNLDLSQKRAYEVMNFIYTFYKSDKLQKLLMASGRSFSDPVFVNGVEDKDKSRRIEIKFSIKNDNALKDVEKFFEFH

SEQ ID NO: 1229 - protein, 331 aa, Campylobacter jejuni
MKKILSLSVTSLALCGALNAVDLKIAGSSTVYPFTSFVAEEYASIKNTKTPIVESLGTGGGFKVFCEGTTDISNASRPMKLSEFETCKKAGVTDIVGMMIGYDGIVLAQNKTNAPLNITKKELFLALAKEIPQNGKLIPNPYTNWNQINKNLPNRKISVYGPPSSSGTRDTIEELVMSDVSKKIPEYKGEYKTIRQDGAYIPSGENDNLIVSKLTIDKDAFGIFGYSFLVSNSDKINAANIDGVTPSEESIADEKYELARSLFIYINAKKNPKEAFDFAKIYMSDDLAKSGGELEKIGLVPLSDDKLKASQKHVEDRKILNDELVKAGKVF

SEQ ID NO: 1230 - protein, 644 aa, Campylobacter jejuni
VKEFLNSLSYGISSHEVNNEFKQIFRELLTNHIIKEHKNKYYLNNGFAFGVLDISSKGTGFLQCFDESFKKDLLIENKNLKGANYKDIVAVKLLPLKKKRPSAKVILVLKRANETSLMITKRYGEAVLGMNIKTGLSTALKASQKSLKALPLGTILKIENENNNIIEVLGHIDDESVDEKISLALFNKNNEFSDACIKEALANGDSVDASMYENRMDLRALPFCTIDPIHAKDFDDAIYFDTQKREIYVAIADVSEYVYAYSAIDKEARNRGFSIYFPHIAIPMLPRPLSENICSLKPHLDRLAYCFKITLNHENKVIKEELFEGIINSKRRFNYDEVDEILIQKPDLKELSWLYELFEITKNLRKMRLKNAFEFRTEELRMNLDENLSLKSTVFEKDTPSHNLIEDCMLLANKAAAKLIDIGVFRNHLSADVRKIDKLLNELRELGIDVNFKPNLPELIRDIQALADELNLRAEVDKLIIKAQKKAEYSSVNAGHFGLGFDKYSHFTSPIRRYSDLILHRLLKAKQKNDEKLFNYLLLNIESTCENLSTLEREADKVAFDFMDRKFARWAAKNIGKKFKALVVQNDGVCIAKLDDEIKGADIILYDTRVNLLENVEVQIMEADIVMAKIYAKITQRLIKEENV

SEQ ID NO: 1231 - protein, 507 aa, Campylobacter jejuni
MINRIFMKENLGFKKAELEISKGLTVFTGLSGAGKSVLFKGILSAFSLSESEAKIVEIEVDDKLDLESFGIESEEENVFKLLKEKNTKYFINNQSIAKKSLQNLSKTFIKYLSAKENNEFGNEKFLNLLDALEMQENTNFVSFLEDFKKDFNAYSQISNELNAILEEEKKVEELKELARAQIEKISSINPKIGEYEELLILKKKLSKKDKLEEAWSKAERIFELEKVVIEALNLSEVDASFFSECLNELRVICENQKMEDLDFDVEALLDRIENLSYLIKRYESIENALEVLKQKKYELEHYENLSFEKKELEKKFQELKQKLEEKAQILTQTRKKNLKKLEKCLNNYLKDLYMKDASLTLKENEKISILGKDEIMLDINLAHLKNLSSGELNRLRLAFIATECNILNAGKGILFLDEIDANLSGKEAMSIAKVLEELSKFYQIFAISHLPQLSSKAHNHFLVEKNGEESKVKKLDQEERIKELARMVSGELVSDEAIEFAKTLFKN

SEQ ID NO: 1232 - protein, 601 aa, Campylobacter jejuni
MRMRLVVGFILLFFIFLLSRVYYLSIKSNVYYEELAKQNAIKTEFLPPVRGQITDRNGTLLAINDLGFSISIKPYLSIKKSNKGILDKELSELTNLFPDLNASKLAEIYKRNDSYYNQDFIKVVDFIPYDEIISHYSELNLNKTIKIDPVVKRKYPFGKLASHIIGYVGKANLQDVQENEIAKLSNYTGKSGIERYYNDILQGEKGTRVYKVNALNQEVEQLSYTPAMSNDIELTIDIELQSYLTSLFEGNAGAAIIMNVNDGSILAAGSFPEYDLNPFVTGISFKDWDELSNSLDHPFTNKLINGYYPPGSVVKMGVGLSFLNSKNISPSTHYVCNGSIELGGRFFRCWNRSGHGPVDLKHAIKYSCDVYFYNGSLQVGIDQISETLSRIGFGVKTGVDLPSEFVGTLPSKEWKMQRYRQSWFQGDTLNTAIGQGNFLATPMQIARYTAQIAKSGEVIPHFLKSIENNNTTIENQMDENKKEIFTLFEKSQLPYIRDAMYAVANEQGGTSYRYLHNLDVKVAAKTGTAQVVGFSQTDKNRVDEKQFEYYTRSHAWLTSYAPYSKPKYVVTVLLEHGGRNITSGATVAKIYQKMIELGYFK

SEQ ID NO: 1233 - protein, 145 aa, Campylobacter jejuni
MNKAFTLLELVFVILILGILSSLSLSFINTTKDEVKILKLKMDYEMLSSALALMRSQMRLKNLNFPEILDNAQNNQAKEKLFYCLNDCDYSLLDTPIYSDFKSWIKIGKNHYRFALNAKEMVEFIYDSKEGLLKCIGSSRCKDLI

SEQ ID NO: 1234 - protein, 232 aa, Campylobacter jejuni
MKKVLFYVLPFAFFGCSATVDPQISMKPPAYVEELAPKQSNNVESAPGSLFGKGDNPLFSDKKAMNVNDLVTVVIQESTTQSTQANKATSRTNTSNLGGGALTGSSGVVANALNKVNAYSNIGFQTNSSNNYTGTGSQSRNESFNTTISTRVIKILSNGNYFIEGSRELLINGEKQIIQLSGVIRPYDIGQDNTIDSKYIADAKILYKTEGEVDRSTRKPWGSKVIEAIWPF

SEQ ID NO: 1235 - protein, 396 aa, Campylobacter jejuni
MKILVLNSGSSSIKFKFFDNKVVKASGLVEKIGEQNSKVVLKNTLNNESFERELTINNHEEGLSIVNELFKESGILADLNALDGCGHRIVHGGRNLSEHCLVDDYVLKEIDRVSIFAPLHNPAHLAGIKTMIKAAPSVANAAIFDTAFHRTMPDFAYMYALPYDFYDKHNIRRYGFHGTSHAYVSSRAAKFLQKDQNELNVISAHLGNGASVCAIEKGKSVDTSMGFTPLEGLVMGTRCGDLDPAILPFISHLKGLTIEEIDTLMNKKSGVYGICGYNDFRDIEREIEQGNDKARLALDMFCYRLVKYIGSYFAVLPKTDAIIFTGGIGENDSLVRQKVCERLAHLGIELDFELNKQRISGERMINHANSKVKVLVIPTDEELEIARITEELIGKN

SEQ ID NO: 1236 - protein, 1250 aa, Campylobacter jejuni
MNYYQELKKYLNNNLFTSYSLEIDFPKIYNFNANQKAFRDILTKITKIYDKNKFIKQNEHQFEDEFISKVLEILGWCFVRQDEKIIQGKLEKPDFLLFSNDKLKSKYENLDKETKKSSNDFTIILESKAYNIEIDNKKVKDNPHFQILRYLGNLKKNYGFLTNGRFWRFYDNSILNSNKVFYEINLEKIIEDQNIEAFAYFYSVFSAFNFTEKEDHLEITLQNNKLSKIKIEDDLKSIIYGTNGNESLFEFIGSRIYNKTKADLKLIYENSLYFIFRLLFIAYFEDKFEIILEKHKYFKSKISLRTLLENLQEDESSSGGFGELENIFNIYNKGKGNFDMPVFNGGLFDESKTALLSTPKIFNDKDLKFILNQLLNFKDKNLSFKRDYKTLSVEHLGTIYEGLLSYFFEIANEDIYYVSYKEKSKEIECYFDNYDFKILEKSKKVEKYTFYKKGQIYLKNTSNSRKASASFYTPQSIANFLIQSALKDKLNNENILKFKILDNACGSGHFLVGVLNAITHIVLSDFDHFTNLKELYEEEKENILNHIKDFVQDYEVDESDILKRLLLKRIIYGVDLNPFSIELTKLSLWIDSFIFTTPLSFIEHHIKCGNALINSNLSDFKDLIKQNSSNLFTNSITQEFEILQEVFEKLDNLKDTNEEQIKQSKQIYQNEITPKLNKLNLYLNYINTLHFVNKEELQILKALSQDDIQNLSQNEQAKAIISKYQKEFNFFNYELEFPEIVENQVFKGFDIIIGNPPWDKTKFSDSDFFPQYKSDYRSLIASKKKEIQDNLLAKDYIKQNYEKQKAYINDLSEYYKKAYPLNKGSGDGNLFRLFVEKNLSLLKQDGNLAYVLPSALMFEDGSLILRKEILENKTLEYFYSFENNKAIFIDVHRSYKFALMLIKNTQANHTHKIKMMFYKTDINSLKNKDEILTLNLKDIKKLSPTHLALMELKDKQALEILRKSYNAFQNLSFDYIDFRRELDMTNDKDLFIEEFREGLLPLYEGKMIHQFDANFSQATYFLEKAKFDERLKSKELYRAKKATGKELNPKLIKYDREFFRLGYRKIASDTNERTLIASLLPKNCGGADSTYSNIPKQYVLKDDVICMDIVPYERILFVLALFNSLVVDFIIRNMVQINVSKSYLERIPLPQPSDEEIQNNEIYKTLAKNALLLQLYNDQNRHFDELKQEFNIKNEEIPKTKKAYDILRAKNDLLVKELYGLSDDEFSYMISTFKVLNEKQSEYITLLKTI

SEQ ID NO: 1237 - protein, 312 aa, Campylobacter jejuni
MLEDDFIKERQNIRQKMLKFSRAINQGKPLDDDLRDEISSDDILRRRFKKKTPNKFLEELDEEYESKHTKKSNIYLKEDLINVKLEEKQSLAKKIFSKMKERRKEENKKTKKNFLFSRKKANEIKNIQTKTQIQTKSNQATTQTKQEKKELTNSIEKIQKTETKIQKPLIIEKKLDVKNQPNIKKSLENLQKKITPQENKQELPKPSNQAQEKQQNDEDAQKAKNILLEGFSNATKEDRNLNFNHLLFAALLVSFALFLFAPQIYIRNQIYYLSREIATLRTEESVLNEENKDLKRRLENMRFQNQILDYLE

SEQ ID NO: 1238 - protein, 370 aa, Campylobacter jejuni
MSEFLVEEMQHNKGAKIKVIGCGGGGGNMINHMVKMGLNDLDLIAANTDAQAISISLAKTKIQLGEKKTKGLGAGMLPEVGAESARESFEEIKASLSQSDIVFIASGFGGGTGTGATPVIAQAAKEIGALTVSVVTMPFAFEGKQRKKLAESGLLELKKESDSILVIQNEKLLSIIDKKAGIKDAFRLVDDILARAVKGMVSILLDNGDINVDFADVRTIMSHRGLALMGVGSASGENAIEEALSNAIESPLLDGMDIKGAKGVILHFKTSSNCSLFEISAAANSIQEIVDENAKIIFGSTTDDSMEDRVEVTIIATGFEDKDTVAKKSTEEAQASKKNPYLSLKKVSGGYDEEIMAQIETPTFLRRQMD

SEQ ID NO: 1239 - protein, 476 aa, Campylobacter jejuni
MGKFVNNIDDFFKFCKQNEVLFVDFRFTDMIGTWHHITYNLHAINEETFQTGIPFDGSSIHGWQPIEKSDMILKPDAQSAFLDPFTADPTIIVFCDVYDIYKGQMYEKCPRSIAKKAIEHLKNSGIADTAYFGPENEFFVFDSVKIVDTTHCSKYEVDTEEGEWNDDREFTDSYNTGHRPRNKGGYFPVQPIDSLVDIRSEMVQTLEKVGLKTFVHHHEVAQGQAEIGVNFGTLVEAADNVQIYKYVVKMVAHLNGKTATFMPKPLYGDNGNGMHVHMSLWKNGVNLFYDKDGYSGLSQTAINYIGGILKNARSVAAFTNPSSNSYKRIVPGFEAPCILTYSCQNRSASCRVPYGIGKNSARIEIRFPDSTANPYLAFVSLLMAGLDGIKNKTIPVGPMDENLFDLTLDEIREKGIEQLPHTLRGSLEALIRHNSYLKPVMSDIFIDDYQHLKFETQVWPVEARPTAYEFKTCYSC

SEQ ID NO: 1240 - protein, 287 aa, Campylobacter jejuni
MTFSQMILNLQNYWQEQGCAIMQPYDMPAGAGTFHPATFLRSLGKKPWAAAYVAPSRRPTDGRYGENPNRLGAYYQFQVLIKPSPDNIQELYLKSLENLGFDLKSHDIRFVEDNWESPSLGAWGLGWEVWLDGMEVTQFTYFQQVGGIAVDLVSAEITYGLERIAMYLQNVDNVYDIVWSEFNGEKIKYADVHKQSEYEFSKYNFEVSDVKILNEQFENSYKECKNILEQGLALPAYDYCMLAAHTFNLLDARGAISVAQRQDYMLKIRELSKNCAEIYKKNLNEAE

SEQ ID NO: 1241 - protein, 445 aa, Campylobacter jejuni
VFELVSESFKSAINKLRFVDDEKALKNALETLKKALLKADVHHKVTKELLTLIEEDAKQNGIGQKQFLNAIKINLENILSVNGKNQGFVFASKPPTVVLMAGLQGGGKTTSTIKLANYLKLRNKKVLVAACDLQRLAAVEQLRQLCEANEIELFFIENEKDPIRVAKEALKKAESSMVDVLLVDTAGRLAIDEALMDELRAVKDVLNPDEIFYVADAMSGQDGVKTAASFNEVLGISGVILSKFDADTKGGVALGIAKQIGIPLRFIGVGEKVADLEVFIPDRIVSRIMGEGDLATLAEKTAAIIDEKEAKKLNQKIKKGEFNFNDFLNQMESIKKLGSMKSLIGMIPGLGGMANAVKDIDLDNSKEIIRIKAMISSMTPKERENPDLLNNARKRRIAEGAGLSQVEVNRFLKQFSNAAKLAKRFSGKKGMESLTQMMSQARRQF

SEQ ID NO: 1242 - protein, 1200 aa, Campylobacter jejuni
MSQFTHLHLHTEYSLLDGANKLKELALTLKEQGATSVAMTDHGNMFGAIDFYQTMKAQGLKPIIGIEAYLHNHDELDDKSSRQRFHLCLYAKNEIGYQNLMYLSSQSYIKGLYYYPRINKKLLEDYSEGLICSSACLQGEVNWHLNTYSERNVRFGAKGYEAAKEAALWYKKVFKDDFYFEIMRHGIGDQRMIDDDIIRLSKELNIKIIATNDTHYTFKERAAAHEVFMCIAMGKKLNDPDRMRHSVHEFYVKSPEQMSELFADIPEAIENTQEIAQKCNLELNLGNPTPPNFKFTREYAKDHNIILPEETKEFSFDNDDMVFEELCKKGLEERLKFIDESKHEEYKQRLEVEINIIKNMKFSGYMLIVHDFIKVAKDKGIPVGPGRGSAAGSLVSYCLRITDLDPIPYSLLFERFLNPERVSMPDIDVDFCQDRRAEVIDYVIDKYGADKVAQVITFGKLLAKGVIRDVARVCDMSIQDADELAKLVPEELKITLDAAYEKEPKIKEFIDRHPKGLEVWEYARALEGLNRNAGMHAAGVVISNESLWKKTPLFRQSKNDERHLVTQYSKDHLEDVDLIKFDFLGLKTLTVINNAIKLIKKRYNKDIIWETIDVNDSKVYKTIQSGNTLGIFQIESGGMQSLNARLKPERFEDIIAVLALYRPGPMESGMLDDFIDRKHGLKSIEYPFDSLEKVLEPTYGVIVYQEQVMQIVQIIGGFSLGGADVVRRAMGKKDPEKMKKLKTDFADGAEKQGYDRAKAEDLWELIVKFAGYGFNKSHSAAYALITFQTAYLKTYYPSEFMAALLTSEENNVDKIAVYIDEMKKMNIKLLPPSINKAIREFSALEQDGKDAIIYGLGAIKSVGIPAVENLLEARQDGEFKDINDFLGKIDPTKINRRTLESLIKAGAFDEFGFTRKALFDNMENLSEASRKMAEVRKNAASSLFGEEELTSGVQVNFTPKNEEFEVMEKLGYEKEILGIYVSGHPLDRFYEQINAIDYVKSLDFESLKNNGEILSIGKIEDFKSMMSKNNKRYGRIEILDYYSSFDATVFESNVEEIENIIKDENLKNNAYGFVLGFKAEGGEKPSFFLKAIKDLQSLEDGEIKAIKKFGAKKDFKNKEENHFTAEPKEFEKNIIELDLTRLNRELIYEIHEIARNAHNPNEKNNKKLVLKVISAGSCLLYHTDFIISDSIVEEISNKYA

SEQ ID NO: 1243 - protein, 249 aa, Campylobacter jejuni
MMISDATMMQQNYYLNNAQKASDKALENIAAVRAISGVDSANLAIADSLRSQSSTIDQGVANAYDAIGVLQIADASLTNISQSADRLNELSVKMNNAALNDSQKGMLRTEATRIQESINDSFNNATYNGKNVFQTMNFVVGSGTETTNLNPLATDGLSIDSQDSITNFMDQLGSLRSEIGSGINAITSNINASVQNSINSKAAENNLLNNDMAKNVNDFNANYLKENAAAFVAAQSNMQLQSKIANLLQ

SEQ ID NO: 1244 - protein, 395 aa, Campylobacter jejuni
MTLIAILCLYTALLSWISYAQIRFLEREKDKQAQILSEKDYQNAADIAIENEKFKLFSNFYNLIISIAWIGFGFLYLKELLILNNTRFENTLFLLSFLIITSILNLPLSIYESFIKDKAHGFSNMTVKLFIKDTMKSLILTLIFGFLILYTLLFCYDFFGTFWWIAAFIFAFCIIVIINLIYPTLIAPIFNKMKKLDDENLLKKISSLMKQCGFSANGVYVIDASKRDKRLNAYFGGLFKSKRVVLFDTLLKALNERELLAVLGHELGHFVHKDIIKALFNGAITMFLLFFVFANLPEFVYLESHLEGVNGGVFALLFILANIFSFLISPMLNALSRKNEFAADQHGAKVTSKEDMKNALIALARENKAFIKTSKIYTFFYLSHPSISDRIKALS

SEQ ID NO: 1245 - protein, 358 aa, Campylobacter jejuni
MKKMSKHIVLSFAVSSLLFSQAYALLSGGKFTHGTSGTIHTSGNTVTITGKGQNHVIQWGGGFNIGQNESVNFNGKNQNYLNIAYQKDASKIDGALNRGNNNIFLVNPMGVLIGKTGTITAGKFVASTTALSDDNVKTFLEKGASFSPAFDVSKQGNIINLGKINADNIVLIGNKVEINKGKITLDVLKLEGNKVYVDAGVVKDTKNIVAKAEQEAIIQQSITSFEEDGALLGNSSSKFSFDDSSKVKNWTKYGSIADATEWNKFADFWNVNKEKFRTAFDHFRLIDDIDFSGVKTYIVGDNTSNAFAKSFDGSGYALKNVNINSSNQYVGIFGVVQNSYIRNFNIQGLKIASTGYDA

SEQ ID NO: 1246 - protein, 227 aa, Campylobacter jejuni
MKTFISNHKNQSSFITLFVFTPLFFVFLYSKDFLHIQPNETIKENKFNMAIKHFVQNSSDMKPTQPTQTIQEPSNVQPKEPVQEIKKIKPRKEKPIAKPKKIIPPANAKAISQPKKDTNMQQQTPQASSYQSVSLTSNSELLKEIKSAIDEALIYPRQARKMRMSGEVLVEFTWTKEKKLENLKILKPSKYDFLNKSALETIRIASKKFPQYEKTFHIKIPLVYKLS

SEQ ID NO: 1247 - protein, 696 aa, Campylobacter jejuni
MKKICLSVCAIGLLSSNAISQNVELDSSIVSASGFTQDIKEAPATINVITKKELQSKPYRDVAEAIADIPGVDLYASKGKTGSYNITMRGITGYTLVLIDGRRQGIGGEVGPNGFNEISNSFLPPISSIERIEVIKGPMSTLYGSEALGGVVNIITKKVSDKWETSVSLDALLNENKDWGNTYGTSIYSSGPLMNDKLGLTLRFREFYRQQSNVEFTNGSGQRVQGDQAQSPTKANNFNIGTRISYLANDYNTFIFDIDFSRNHYDNKQGQLGTITSPGRTPGSLTGGYADIMEVDKFVTYLSHEGVYENFSITSGLQYNRVSNDGREVVGQSTQPFLGENRDIVAEDIILDTKSVIPLGQSHILSVGGEYRLEKMQDKIASPTNFDQYLLAIFAEDEYSIKDDLRLTFGARYNHHEIFGNNVSPRAYVVYNPTNELTLKGGVSTGFRTPYANRLINGTYSYSGQGRFPTYGNPDLKEETSLNYEIAAIYNNDLFYVSATGFLTNFKDKISSQSYNNSEPIPGIGTCDADRCSRAINHGKVEYKGVELGAGISPLDNLNVNFAYTYLDTEVKEAQDRSVIGKPEQDSLKHNIMLKTEYSFYNKITPWIKGEWQIDRYMGDTNINREYYKDIFLASMGVRYDINKQWSINAAIYNLFDKSFTNGWESYASGSGSTWVNTYNRIEEGRRMYISINGNF

SEQ ID NO: 1248 - protein, 870 aa, Campylobacter jejuni
MYDKNLEKEYYQICEERGYFEIDGNKTIQEKDKNFCIMMPPPNVTGVLHIGHALTFTLQDIMTRYKRMDGYKVLYQPGLDHAGIATQNVVEKQLLTQGIKKEELGREEFIEKVWEWKEQSGGKILDQMRTLGITPAWSRLRFTMDEGLVNAVKKAFVELYDKRLIVRGNYMINWCTHDGALSDIEVEYKENKGKLYHIKYFLKDSDEFLVVATTRPETFFGDTAVMVHPDDERYAKFVDKEVILPISKKAIKIIADKHVEKEFGTGVVKVTPAHDMNDYEVGLRHNLDFISVFDEKGILNEHCLEFQGLERLEAREKIVAKLESLGFIEKIEEYNNQIGYCYRCNNIVEPYISKQWFVKKEIAQESIEKVALGESKFYPNHWINSFNAWMKDLRDWCISRQLWWGHQIPVYYCECSHEWASQHTPKTCPKCQSQNFKQDEDVLDTWFSSGLWAMSTLGWGNENWGKDKIWSEKDLKDFYPNSLLITGFDILFFWVARMMFQSTNVLHQLPFKDIYLHALVKDEQGRKMSKSLGNVIDPNESIKEYSADILRFTLALLAIQGRDIKLSNDKLLQVRNFTNKIYNAKNYLLLNESKFEDLENITLHSELAKYIYAKFQTCVKDVRENLDNYRFNDAANTLYKFFWDDFCDWGIELSKAEKSSVKELGSIFKEALKLLNPFMPFISEYLYHKLSDTELKTSPSIMISKYPKFKEQDKNIEKIFSLLIESIVSIRRAKSLIDLGNSKIEKAYIKFNDKKIKDEIKAYMNFIIMLAKCEQIEFSEEKLPKAICDVSENLEIFITLENVDLSGILTRLENQKNKLEKESFKLNSMLSNEKFIANAPKEVVEQNKEALENLKIQLEKISVELQNLRG

SEQ ID NO: 1249 - protein, 462 aa, Campylobacter jejuni
MRLLDSVTKEKIKLDKKDISIYLCGPTVYDDAHLGHARSSVCFDLLRRVLLAQGNRVKFARNYTDIDDKILKKMAQSGQTLEEITEFYIKSYEEDMRVLNVLDPDFKPRATHYITAMLDLIKKLAKDGFVYTLEDGIYFDTSKDEKYLSLSNRNLEENISRLSNEVQKRNESDFVLWKFDENFYESEFGKGRPGWHTECVAMIDSIFENTLDIHAGGIDLLFPHHENEAAQCRCGCKRKLANIWLHNGFVKIDGEKMSKSLNNSFFIKDALKEFMGEALRFYLLSSHYRSHFNYSLSDLENAKKRLDKFYRLKKRLDLGEISDFDVLNDIGIKSEIAKQILEILNDDLNVSKALALLDDFISSANLELDKESKNKILKQNIKEALSELAKIFGFGFMDATLYFQWGVSKEEREEIEKLILERTEAKKNKDFNTADAIREQLNSKKITLLDTPNGTIWEKINA

SEQ ID NO: 1250 - protein, 251 aa, Campylobacter jejuni
MITQTMQSKESKESKENSKISFANAFLKQNASKLNEIQNANSQTLARSEALNSTNTTNTSNNTNFSISSKTSSPNYDISSEFKNSIYTLKYKQVDISNTSTNTAYGYSVDKDGYMGSDFNKAAGLPEDFKIHKSTLDEIKKAAENDPVVSSTKEYLGVSSYYSNIDIANTIKQYYNLFSNALGQSFSNDKTSFSEADINSMPSGYGVSGTQWMDFNEPSNRMNITGLKDFSNSLISNVYKTPEQAKEADEI

SEQ ID NO: 1251 - protein, 577 aa, Campylobacter jejuni
MNKFLVSLFLPLVAFANSSEAAANANLFGAFTLIPPLVAIALAFITKDVILSLFTGVLSGTFLLSLSTNIFKAQHLTFVNYYNTTVESFSKIISYILGSTSDPVNAGIILQILCIGGLVALITKMGGAKAVALKFAKRAKSAVSAQVNTWFLGLLIFFDDYANLLIVGPIMRPLADKFKISREKFAFIIDSTAAPVAGIAVISTWIGLEVSLIKTAYEHIGISNISAFGIFVETIPYRFYNIFMLFFVVMTAIMGREFGSMYKAEVRARTTGQIAPLPKSGTLDTTELEDQFLAPKEGIKIRAFDAIVPIFTLIILAILGFYFNGLSTLEGEELAKASTNPLSFETFRAAFGNADSSVVLFQAALFAAIVAIFIGVRRKIFNLKEAVETWIYGWKTMIFTIVLLLFAWSLSSIVKDLGTSLFITSLLADKLPEFILPATIFAFASAISFAIGTSYGTMGILMPLAVPLAHEIAKINGMDANAMHHYMVINISCVLTGAIFGNHCSPISDNVILSSMSAKCDHMEHVRTQIPYALFICGISLIAGYIPVSLGLSVWFVLPLNFILIALLLRLIGKKVP

SEQ ID NO: 1252 - protein, 719 aa, Campylobacter jejuni
MINTQLASQIANTQKNDLKVDNSASKDKTNLKDNPKEALAQALKQNLGLSKDASSEEILAKFVQNETGTKLKELVNKLLDQINAQKNPDSPVLKQGKNLNLAPNFANELKILSTELAKSDTFTQVLDRLNQILKPASEIKNNNLAPLFKNSGVFLEAKLKDALNEELLPKSFHSLLSTIKGLSSEKLSVQIAQLANTNLSPKDTLKELKNIINSSKNENKQILNQSSFKALLNLSSKLENFKNYISKNPSHAQEKITPIANKILKELNSIKNDFFKALNKPENLMIKDPNILKQTATAFEKLENTLKNILGNQASKIQDKENILENLLSNKENMKEEKLNHNTKNQDEEKHIKASKEDENLDSGIKTHEEDTQDTKNDIQNNETENKPDNDIKNSTPNQEKIKDEKQEKSKENIKENPKFYETKTENKTSINTNTNTSNPNTNNTQNLNNTQNIQSNNNQTMQNIFKNQEFIKQNIVKNLAFNVENLDLEQVQDLSKNLSNLSRRLNESLKELEPYTQNAKLNQAELKNLEHKLNLSIKDLAQIKPKTEQDIAESLHHDVKSTLLQISNLAKNEGNEAVYNQANRLLAQIEINQLMSLANDSINTYLPFSWDDLNDSKIMFRRGKKDKFFAQIKLEFAKLGDLEILISLNNEKYIDINIMAENIEFRKTIYENAHELKRNINKAGLLSANFFVGDIIRSKFDTRNMKNLDLEMGMDKKV

SEQ ID NO: 1253 - protein, 750 aa, Campylobacter jejuni
MRITNKLNFTNSVNNSMGGQSALYQISQQLASGLKIQNSYEDASTYIDNTRLEYEIKTLEQVKESTSRAQEMTQNSMKALQDMVKLLEDFKVKVTQAASDSNSQTSREAIAKELERIKESIVQLANTSVNGQYLFAGSQVANKPFDSNGNYYGDKNNINVVTGAGTESPYNIPGWDLFFKADGDYKKQISTNVSFTDNRWDLNKDPDKTKYLTGDSKWQQLIGQSYVKDNSLDADKDFEYDDSKLDFPPTTLYVQGTRPDGTSFKSAVLVKPEDTLEDVMENIGALYGNTPNNKVVEVSMNDSGQIQITDLKQGNNKLDFHAVAFTPQADDKTELNNIIQAAQDEGITMEDVTNRVMTAALGNPNNGDITNLNNPVTIQINGQNFEIDLKQTDFIKSKMTDTDGNAANGADYDNVYFEKNGNTVYGNVSQVIKGSNAYATDSTKLSEVMAGDSLNGTTLNLKVNSKGGNSYDVTINLQTSTVSYPDPNNPGQTISFPIMHTNPATGNSGVVTGSNDITYGQINDIIGMFAADKIPTTTIQANNGQINNADYTQIQQLMKDSQATVDVSMDYKGRISVTDKLSSGTNIEISLSDSQSGQFPAPPFTTTSTVQNGPNFSFSANNSLTIDEPNVDIIKDLDSMIDAVLKGNMRADSESENPRNTGMQGALERLDHLADHVSKLNTTMGAYHNTIEGVNTRTSFLSVNVQSIKSNVIDVDYGEAMMNLMQVQLAYQASLKASTTISQLSLLNYM

SEQ ID NO: 1254 - protein, 862 aa, Campylobacter jejuni
MFLNALKAVFGTKNDREVKKYFKRVAQINALEGNYQNLSDDELKAEFAKFKEQILSGEKNENDVLNDVFAIVRETGKRTLNMRHFDVQLIGGMVLHDGKIAEMKTGEGKTLVATLPVVLNAMSGKGVHVVTVNDYLAKRDAEQMSAIYNFLGFSVGVVLSSQNSDIEHKQAYDCDITYGTNNEFGFDYLRDNMKFSKAEKVQREHNFVIVDEVDSILIDEARTPLIISGPTNRTLDGYIKANEVAKQMQKGEAVLPPAKPEGDFVVDEKNRNILITEAGIAKAEKLFGVENLYSLDNAILAHQLDQALKAHNLFEKDVHYVLRNNEVIIVDEFTGRLSEGRRFSEGLHQALEAKENVKIQEESQTLADITFQNYFRMYNKLAGMTGTAQTEATEFSQIYSLDVISIPTNIPIKRQDKDDLIYKTQNEKFKAVIEEIKKANAKGQPVLVGTASIERSEVFHNMLVKEKIPHHVLNAKNHEQEALIIQDAGKKGAVTIATNMAGRGVDIKIDDEIRALGGLYIIGTERHESRRIDNQLRGRAGRQGDPGISRFYLSLEDNLLRIFGGDRIKSIMDRLGIEEGESIESRIVTRAVENAQKKVESLHFESRKHLLEYDDVANEQRKTIYRYRNELLDENYDIRAKISQNIAEYSANVMNDYMLDESGSNVNFENLKAKILYECSTQISEKDFENLSVIEMQDKLSQILENSYNEKMLRLEIKELRNIERILYLQVLDNAWREHLYQMDILKTGIGLRGYNQKDPLVEYKKESYNLFLELVNRIKFDSIKLLFSVQFNQEEAQNLENKANEENEKLLQSSVEMGASEDNLGEAEFKKVPRNAPCPCGSGKKFKECHGKSGPKQGILA

SEQ ID NO: 1255 - protein, 528 aa, Campylobacter jejuni
VNNSNNIFQQKRILLAVVISFLFFVIYDYFFIPKQPLKIEQNITQKNQQNTSINNTPNIQNATTNTPSAALVSQDSVISKVQSKHFEAQIDSFGRISAFYLKDRKYQNEKGEFINLVSKENSPYPLEMRFSDPSINSEAFKIPYVANASNLFVDENGSQVLKLTQNLSGLKIEKDITFYPKGNYEIEVKLSKNANYFISPGYRPNIAVDSYTVHGALVMDNKETIETYKDGDVEKDESANNVVMTSAFDRYYATFFYNFDKPLNVAISKDANQNPIVFAYSDNEFKAGGYIGSKEHVILRSIDPRLEAVVEYGWFTFIAKPMFEFLNFLHQYIGNWGWAIVVMTLIVRIILFPLTYKSMISMNKLKDLAPKMKDIRERYKGDPQKMNMHMMELYKKHGANPMSGCLPILLQIPIFFAIYRVLLNAIELKAAPWAFWIHDLSVMDPYFILPILMGATMFLQQLITPMTIQDPMQAKIMKFLPVIFTFFFITFPAGLTLYWFVNNLCSLVQQWVINKIFAKEHHKKTSGA

SEQ ID NO: 1256 - protein, 1081 aa, Campylobacter jejuni
MKNIIKSIGDLRVSVVLFLLFALFCALATFIESAYGTPTAWAMVYDTFWFEYIQLLLGINLLCGMFRYKMFGLKKLPLMIFHISFLFILVGSAMTRYAGFEGILPIREHTQNSLIESSKTSLRISAIKDGERYSAVNDRYIGNLPFANSFKLKLNLGDDQAVLKYKDLILNAHYTYKENNNSDPLLVLMLSQKGSQGVDVKFEKGEVKNIEGVNFAFMNDNVKAPFVKIDENLTLSSSENLHFLSMLDGQNLDLKIGEKANAKERRLYEINDISFVVKAASLHAQEALEGSNRPQDESFWLWFKSAWLEVGRTMLISTFGEPQNWKNSLLLHFKDFALSNENKNLELTGSNALKLELSYKNESKEFYIFEYNKPIMIELADQKFFISWALSYEQLPFDIYLRDFVLDRYPGSMSPASYASEITVKNNNENFDYRIFMNNVLDYDGYRFYQSSYDQDEKGTVLSVNKDPGKIPTYIGYFLLCLGMFMNFLNPHSRFRTLARLINKDTLKHTSVIIFILLLSFGSEKTFAQDLNSTLPVVNTNHAKALATLIVQKSADGRMVPFDTLSREILEKIHQSDSYKGQNSNAVMLSMLVDVDKWQLEPFILMPQNQAVRDAIANILEIPSAKYIAYKDFFDENNRYKLQKYVENANRKNPNARGVFDKEIIKLDERANVVNLVFSGELFKFIPVQNNPNNVWLAPFSAVTTLKGDEGHIVLALIQNYFSAVENAFKDGNWIRADEGLKFIKEYQEKIGYKVMPSKTKVEMEIFSNKAEIFVKLAPVYLIAGFLLLILVFSKMVVPNLKISFIFKVVYVLNVLAFVIHTVGLGLRAYLSGHAPWSNGYESMVYIAWALSLSGIFFSRKSPIALSLTSILSGVVLMVAHLSEMNPQITNLVPVLNSYWLSIHVSVITASYGFLGLCALLGIFTLFLMCFLKKDGKYNLNILRNITEATRINEMAMIFGLCLLTVGNFLGAIWANESWGRYWSWDSKETWALVSILVYAAILHLRMIPKYCNQFVFALWSMFAYWVIIMTYFGVNYFLTGLHSYAAGEAAQIPNYVYWGFALMVVLAFFARRKRNFVGKL

SEQ ID NO: 1257 - protein, 424 aa, Campylobacter jejuni
MFEKYLKSAIFLALYPLAMLASNLHEFIALSQNNESYLIKQMQSEQANLDKEQAFRNYLPSLSLNSAYVANNKDRFIIDPQESLFAKVSLNFLLFDGGAREANLRALESREKLSLLDKEQNKNYLALNAITLYFNTLSLEKILLANQQKVSFLKSTFERLQKFYDAGLSPKDELESIKAKYHLSLLELSQNELKLANIQKEIKILSDTDFKVQGNAFLENPQQEKSQNYEVMIAKEQINLAKESVNLAKAEYFPKFYIQDNFNFYKNNYNPKVPAPFANLADQFLEKYSQGNQFILGMEWKIFDFNARAKEVEKERLNVQIANANARFSERKNKEELNYLDKSLKVLQEQILALNLSLNAANLAFESVDKKYQAGLVSYVEYLQALEVKFKAQSDLELAKNEFEITKANYYFNAGIDLNSKVKE

SEQ ID NO: 1258 - protein, 246 aa, Campylobacter jejuni
MKKILFLLLVFNCAFGEEIYASFNVEASKQSKLALESIGLVQKIPVEIGQKVSKGELLLALDQESEKIALQNAQNSYQLALVEYENTKSRMQKIKAVENVIDKQSYEDMKAKFDAANLNLNKAKINIAYYKNIMAKKELRAPYDAIIANKFIQVGEGVGGVAQPLIEIFSYPQSKLILSFDEKYKDKVRLGDDFFYKIDQNGTELKGKINLIYPSIEVKTRKIYAEVQTTNLTPGLFGEGRIITKD

SEQ ID NO: 1259 - protein, 1005 aa, Campylobacter jejuni
MFKLAINRPITVLMFFLALMIFGLISAFSMSVNLFPNVSIPLIKITSKINGDLNFVESKVTKEIENALSEIDGVKTITSAAYDNFSVSVVEFKLGKNLEVAANDVRDKIGTLSLPSKPEIEKISSDSGSAISLFLYSKDKLQLMREINDKIKPFLQRVEGVGKIEAKGFLEPQIRIELKPNQLRKYNLNALDVANIIKSQNFKQALGELNNNQDNYIIKGYFEATNLEELSNLRIKTGVFLSDIANISSLYEDEKQSALYEGKEGVLLELGKITNYNTLEMIKNVKNALPILEKQIPKDISINMLYDKSLNIHKHLSQVIFDMVLGIFLTLVIVFLFLRNLSTTLIACIAIPTSIISTFFIIDLLGYDLNRLTFIALTLSIGIFIDDAIVVIENIAKKLKTYPPLQAAFLGINEIGFSVLSISIVLLCVFIPISYMNSISGLFFNALGISVASGIVISFLVSVFLIPSIGARFLNPKENKFYEKTEAFFEKIEQKYENLLYKILQNKVKFILATLVFIGLSFALATRIGLDFLPMEDDSEIQVLLESKKDLSLEAMKEKSLNLLEKIKNDSNVKYAFLLVGYDDAKDATKAKIYVKLKNLDERNLRQSAIVSLYRQKFQDESLKIKILELPKIEGAGIDDPVQFLILGDDLNTLKEAASQAKEILGTNARIVDISDNANATKDEVALHINKEKAKLLDVNPQYIAGVLGYSFSQLSVGSMDRGNSKDDIILSFAPEFKKDIEALKRISIKNNQGINLELSSVVDFIYSKDLKTINRYNKNRSVKITAGVNDLSLGAVQKLLLDNMDKILNNNPSLSYAFSGFINLLGETVQGFAMAVALAFVLIYLVLAALYESFILPLIIMITMPLAFGGASIGLFITGHNFSLFVLIAIILLFGMVGKNAILLVDVANKKCHEGLDPDKALLIAGKSRLRAILMTTFAMIFAMLPLALSRGAGYEANSPMAIAIIFGLISSTLLTLLVVPALFKFCFKLDSKLRKIYEREKLN

SEQ ID NO: 1260 - protein, 365 aa, Campylobacter jejuni
MNAKEFLIELLKFKSVTPNDDGALNFIAMELSDFEAFFIEKEGIKNLLLTKKFKDEGEHLAFGGHVDVVPAGEGWSNNAFAPVEKEGFIYARGAQDMKSGVAAFVDAAKNADFKGARLSLILTSDEEGEAIYGTKAVLEWMQERDMLPDYAVVAEPTCVKKIGDSIKIGRRGSINGKLLIRGKQGHVAYPEKCINPVHDFAPVLKLLAGFDLDPGSAEFSPSKIVITDIRGGMGVCNVTPNDLKLMFNVRNSPDTSLEDVKSYVEKICHGLNYELELKQSSEAFLTNIDNKIVQKMNESVQKITHEVPELNTKGGTSDARYFAKYGVKVVEFGVCNDRIHAIDERVSIEEFEKLCLVFKDLIENF

SEQ ID NO: 1261 - protein, 917 aa, Campylobacter jejuni
MDYKETLLLPSTTFAMRANLAELEPQRFKKWFEQNYAYEKMKENRKNAKKSFTLHDGPPYANGHIHIGHALNKILKETIIKTHYFKGESVRFTPGWDCHGLPIEQQVEVKLGEKKKSLSKKEIREFCRQHASEFVDIQREEFKDLGIIADWDKPYLTMKFEFEAAIYRTLCEIAKKGLLCERSKPVFWSWAAKSALAEAEVEYQDKEDYSIFVAFDLDVKACEKLGVSKASAVIWTTTPWTLVANQAIALNPNENYVITKEGLIFASALLKSMVEKGLTSGEIQKELNAKEFEKLEAINPLNGRKSVLIMGEHVLMDGGSGLVHTAPGHGEDDYYACLKYGIEVLMPVDDSGCYDETLRAKGLLPSHLLEEFIGLHIFKANEKILELLGEKLLHSSKFIHSYPFCWRTHKPVIYRATKQWFILMDEPKLQGKTLRECAKEQLLKTTFYPQSGVKRIGSMVENRPDWCISRQRDWGTPIAFFRDKNTKEVIFDDELFDFVAAIFEKHGADAWWEFEIKDLIPTNSKYKAENLEKVYDILDVWFDSGSTFNAVLNSGLYDAGEKRASMYLEGSDQHRGWFQSSLLVGTAINESAPYESILTHGFTTDEKGQKMSKSKGNVIASEYVAKTYGVEILRLWILLSDYSSDLKISDNILKQVGEQYRKIRNTIRFLLANTNDLKDLEVKEFSFIDKWILSRATKVFKASKEAFFAYEFAKGFSLLLNFLSADLSGIYLDISKDRLYCDSENAQRRKSAQVAMALMAKELLNLLAPNLSYSVDEALEHANVLIKGDAKDVFDLSLTQDFDYDFGIDDTFLMSAREKFFEQIDILKKDKIIKSTLELNLNISFNKFPNEELADWFMVSQISNENEEILAEFEVENEKFKITKASLCKCPRCWKLQSKNEETPCLRCEEVLKGVQC

SEQ ID NO: 1262 - protein, 791 aa, Campylobacter jejuni
MQIEEIQNYPANLPVLVEDELFLYPFMITPIFINDSSNMKALDLAIKNDSMLFVAPSKLENGRNFDEIYNCGVIGTIMRKVPLPDGRVKILFQGYAKGKIIEQISNKPLEAKIELIKEDFLEGTKKEALLEVLKEKVKNLANISHYFSPDLLRTIEEGFDASRICDLILNTVRIKKQVAYEFFVLTDLEQKLVKLIDLIAQEIEANKIQKEIKNKVHSRIDKVNKEYFLKEQLRQIQKELGSDTQKEDEVREYQKRLELKKKFMHEDAYKEIKKQIEKFERIHQDNSEASMIQTYIETALDIPFEKISKKKLDIKEVSKQLNHDHYALNKPKERIEEYFAVRELLEKRKIAEKDGAKVILCLYGPPGVGKTSLANSVSKALKRELIRIALGGLEDVNELRGHRRTYIGAMPGRITQGLIEAKQINPVIVLDEIDKLNRSFRGDPSAVLLEILDPEQNSKFRDYYLNFNIDLSKVIFIATANDISNIPAPLRDRMEFIELSSYTPSEKFHIMKKYLIPDELKKHGLKSNELSIDDETIELIISDYTRESGVRNLRRKVAELCRKSAKKLLLENIKKVIINTKNLNEFLDKKVFEIEKNNGENQVGQVNGLAWTSVGGDVLKVEAVKIKGKGELTLTGSLGDVMKESARIAFSMIKVLIDEGKIKIPKKIIIDPKVNVYDSYNIHIHVPDGATPKDGPSAGITISTAIASIFSDKKVKADVAMTGEIDLKGKVLPIGGLKEKLIAAYKADIKTALIPRKNYERDLKDIPSEVRDNMEIIAVDTFSDVLEYTLV

SEQ ID NO: 1263 - protein, 243 aa, Campylobacter jejuni
MLYILANGSMATALAYGLKDDYEICIVGRSIEKLQALAKEGFKTLLYKDFNIEGKDVILAFKPYALENIAQMLKGQARILISVLANVDFEKLQTIKAQNYVRIIPNTAAKYKASTTPYILKNSHFENEILDILKTFGSAYKLDNEIQMNAAMAISGCAPAFLALIAESIANAGVYEGLSKELSLNLTRSLFKSSNALLEHEHPAIIKENICSPGGVTIKGIKILEQKGIRGSFFEAINASSAK

SEQ ID NO: 1264 - protein, 713 aa, Campylobacter jejuni
MLKKEYLKNPYLVLFAMIVLAYVFSVFCRFYWVWWASEFNEYFFNNQLMIISNDGYAFAEGARDMIAGFHQPNDLSYYGSSLSTLTYWLYKITPFSFESIILYMSTFLSSLVVIPIILLANEYKRPLMGFVAALLASVANSYYNRTMSGYYDTDMLVIVLPMFILFFMVRMILKKDFFSLIALPLFIGIYLWWYPSSYTLNVALIGLFLIYTLIFHRKEKIFYIAVILSSLTLSNIAWFYQSAIIVILFALFALEQKRLNFMIIGILGSATLIFLILSGGVDPILYQLKFYIFRSDESANLTQGFMYFNVNQTIQEVENVDFSEFMRRISGSEIVFLFSLFGFVWLLRKHKSMIMALPILVLGFLALKGGLRFTIYSVPVMALGFGFLLSEFKAILVKKYSQLTSNVCIVFATILTLAPVFIHIYNYKAPTVFSQNEASLLNQLKNIANREDYVVTWWDYGYPVRYYSDVKTLVDGGKHLGKDNFFPSFSLSKDEQAAANMARLSVEYTEKSFYAPQNDILKSDILQAMMKDYNQSNVDLFLASLSKPDFKIDTPKTRDIYLYMPARMSLIFSTVASFSFINLDTGVLDKPFTFSTAYPLDVKNGEIYLSNGVVLSDDFRSFKIGDNVVSVNSIVEINSIKQGEYKITPIDDKAQFYIFYLKDSAIPYAQFILMDKTMFNSAYVQMFFLGNYDKNLFDLVINSRDAKVFKLKI

SEQ ID NO: 1265 - protein, 785 aa, Campylobacter jejuni
MIMKCEHCKLDYKQAQMIEYKGKFFCCKGCESVWEILHESGLDEFYEKLGNQTLSPVNFQNEMKNYDEFITKTKEGFSEIYLMIHGIECAACVWLNEKILTKQEGILELDINHLNHKARIVFDEQSISLVQILRLIESIGYKASAYDASKASKKADLLKREFYSKLVVAIACVMNIMWIAVAKYAGFFSGMDKDTKDILNFAEFILCSPVLFYTGSHFYKSAFKTLKMHSLNMDVLVISGASLAYVYSLWAMFFRVGEVYFDSVAMIICFVFIGKYLEMFSKKRALDTIDGLNDFLQNEVLVFNGKEFVSKEVQKVCLGDRILLKTGDKILIDGICKSGEMSVDTSSLNGENTPKLIQKEDEIFSACIVLDGSVEYEATKFYKDSKLSQIIQLLELASSKKAKLESLVNSLLAYFSRTVLLIAFICFAFWFFYKEESFEISLVNAIAVLIIACPCALALATPVSNLVALGRALKKHILFKSSSVIEDLSKCDCVVFDKTGILTKIELELKEVFLDKALDLNELYNFVKLSKHPISQNIVLYLKQKGAKDLNLDFKKHSSIQAKGLSAELNEGLLLGGSSKFLQEKGIVAKEFDNTHFIFAKEGKILAFFEFDSVLREGAKELIAYLKKEKKELMILSGDHQKAVEKIAKKLEIQNYQASCLPEDKMKTIENLSKNYKVLFVGDGVNDALALKYASVSMTLREGSDLAIESSDVLLLKNDLLSLKKAIKLSKNTFKIIKQNLAFSLFYNACTIPLAFLGMINPLFAAISMSFSSIIVVLNALRIKE

SEQ ID NO: 1266 - protein, 374 aa, Campylobacter jejuni
MREIKIFLVVVVFTALVYWGVEPYAHSVMKPHVAPANFDFAVEDTTFAKGIVEAKELALKDAQASGDAKRIESANKELEKAKEELSKVETLWVDVAKIDFAKGDAKKGKEFFENNCFACHGVKEDGIAANITDSSMGVIPPDLSAAGAIFDEKFLAALIMHPALALKVDHKFGDAFIMTAYNKDTSGESEEATNANIANVIAYLKDVSVKFEANEDATIKKDVEAKYAKMENSAQKAALMEKDIKFAKDKATFIEACGRCHDMKYDSFFTPSNQNDLKTYLGSVPPDLSMMIRSRGEQYLHDFINNTQKLLPGTAMPRVGLTEAAQAKVVSYIDQVGDSKKEERKTTGIYVMIFFVILSIFAIGWKRSVWSKLH

SEQ ID NO: 1267 - protein, 297 aa, Campylobacter jejuni
MNSLYETLGVSKNASADEIKKAYRRLARKYHPDINKEKGAEEKFKEINAAYEILSDEKKRAQYDQYGDSMFGGQSFHDFSRNTGGVNLDDILKDLFGGGFGGRSRGGFNGFSSKGFSSGFGGFGGFEEEILDSNLELHIPFEKAVKGGEHSFNFQGETIKFKIPHGIKEGEKLRIRSKGKQSRNGARGDLIIIVKIEESPIYTREDDDLYQKVDISLKTALFGGKINIKTLKEGKEEAIINITPNSKNNQKIRLKGYGVQNRKSDIYGDMYLILNVVLPNLDTLDEKFIELLKEKLP

SEQ ID NO: 1268 - protein, 206 aa, Campylobacter jejuni
MINVFFDMDGTLIDSANAISCAVNEIRQDLNLAPLSREIIMQTINTPNIDWAKELYNIENFHHSSFKEGYEKYFVKHYEQSVVLFEGVKELLEFLKSKNCFLAIATNAPQSSLSNILKKHDIIPYFDKILGVSLGIEPKPHPMMLELLKSEAPYKTSVFIGDSQKDKECAKNANLPYFHAKWYQKNLKENEFSNASELKGFLQKYL

SEQ ID NO: 1269 - protein, 316 aa, Campylobacter jejuni
MKFSDFFHAWLHESYYKNAVSIGKNGDFFTAVSVGNLFGTLLAKHFLNLIDEKILKPPLELVEIGANEGYLSRDFLAALLELRPEIFSQISFFIIEPHEKLRTLQKKTLEGVEFTHKNSLKECHFKNAFFFCNELFDSFTCELIDHDKMAFVENFKLIFKNMDENLITKCKALNLTKGELSLELENFFKDLNQTCERFIFAGFDYGTLNPQSFSLRIYQKHEVFSPFEVSLKDFFGKSDLTYNVNFTHLQKLIKEYDFKPLAFKKQSLAFMDFGFEDLLEYAKNKNIKTYESFLSQAKILFFNFDEKFHFFEFQKN

SEQ ID NO: 1270 - protein, 411 aa, Campylobacter jejuni
MTKNYSIHTKLIILFVVTFFLVCVLFIVLLKIEGNTYNEEESLKQENLIKNLLISYENTSGVEIGAYLGNSGFNAIQNPNLVKAIRNNGQSLFKAGGELCTLSSLKYHSNLYFDVQCKDFDGLYEENTSDRVYNLLLIGFFSFSLLVVFMYFSVLKSLEPLKKLRRQVAEVANGEQPDFLDYQEDEVGKIAFEFQKAFKKNQELIQSRQLFLRTIMHELKTPIGKGRIISEMIKEDRQKERLIAIFLRMDSLINEFAKIENLFSKNYNLHFKPSRFSTILEEAKEHLMIDDFNKVVKVDIRYDALINVDMEIFSVILKNLIDNALKYSNNGTCELFCCKECFTIKNPGKPLAEPIEHYLEAFTREKHNQVKGMGLGLYIVSEVCKLHNFDLIYFYDDGKHCFKIFFGDKEK

SEQ ID NO: 1271 - protein, 571 aa, Campylobacter jejuni
MSQKIIVDPITRIEGHLRVEVVVDDNNVVKEAYAGSTLWRGIETIVKGRDPRDAGFMTQRICGVCTFSHYKAGIVAVENALGITPPLNALLTRTLMNAALFLHDHIVHFYQLHGLDWADVVSALSADVKKASDEAFKYTSNPYATGADKLLEVQQRLKTFVDKGNLGPFANAYYGHPTYRLSPEQNLIVLSHYLECLRIQRIIAQCMAIFGAKNPHPQSLTVGGVTCVMDLLDPARMGEYMVKFQEVQDFVNRAYYPDLVMAGKAYAHEASVLNDIGVNNLYTFKEFQIGRDEWLFESGIIKNGDLSKVYEVEEDKITEEATHSWYADNEPLHPYDGKTNPNYTGLVDGESVDHHGNNVHSKVFDTKGKYSWIKAPRYEGNPMQVGPLANVVVNYAKGNQNVVPVVDEFLKETGLPLNAVFSTLGRTAARCIEAKIVANNALKAFNNLVENLKVDQSTCAPYVIDNSKEYKGRYMGHVPRGTLSHWCRIKNGVIENWQAVVPSTWNASPKDANGVGGSYEQCLIGLKIADVKQPLEIIRKIHSYDPCIACAVHVMDTKGNNLSEYKVNVNL

SEQ ID NO: 1272 - protein, 379 aa, Campylobacter jejuni
MIDYHQIESRLSALEKLPSLKDNDSITKALEKSGFSRRDFMKWAGAMTAFLALPASFTPMVAKAAELADRLPVVWLHMAECTGCSESLLRSDTPTIDSLIFDYISLEYHETVMAAAGWQAEENLESAIQKHKNKYILMVEGGIPMGDTEHFLTIGAHGKTGYELSKMASENALAIFAIGTCSSFGGIQAARPNPSNAQPLSKVTSKTVINVPGCPPSEKNIVGNVLHYLLFGELPALDVYNRPKWAYGLRIHDLCERRGHFDAGEFVHAFGDEGAKQGFCLYKVGCKGPYTFNNCSRERFNQHTSWPIQAGHGCIGCSEPNFWDTMGPFEEPMASRKFDTVFGLGADSVSDKIGIGVLTLTGVAIAAHAVISSMQKDKE

SEQ ID NO: 1273 - protein, 731 aa, Campylobacter jejuni
LKPIDEELLLEQLIDNVKNCKDLEAAKALLFEICGHDAILEKAVDYCIFCHEGQFRKSGEPYAVHPILVATLVGFLSENKSNILAALLHDVIEDTNCTEEELREQFGSEVLKLVLGLTKIIEIREDNLISSKSKKSLTKSALTFRNMLLASIEDVGVLIVKLCDRLHNMLTLDILREDKQKRISEETLVVYAPIAHRLGISSIKNYLEDLSFKYLMPDEYKLIDNYINSNNQEMQLGLNEFISKIELLFLSNGFRQGSFEIQKRIKHSYSIYLKMQRKGIGIEEVLDLLGVRILVEKVSDCYLALGILHTHFNPLVSRFKDYIALPKQNGYQTIHTTLFDAKSIIEAQIRTFDMHKIAEFGIAAHWKYKEDGSVVAPRLDWLTDISMQSINNLENAEDYNAIELYEYAKDSLYVEDVAVYSPKGEIFTLPRGATVLDFAYEVHTKVGLHAKSAYVNRIKVPLLTELKNGDIVRVVTSNDKFYRCSWIDSVKTGKAKASIREFCKQKIREINLASSINMLSFIFGVDKNRIETWIEKENLVRRIRQVATDSAYLKDIVNGLKKYAKKSYWFDKYEIKEQKIGNFTLYCNHKIANVDFDFCCHPKRGDAVLAFVKGGNAIVHHKLCDRADKMIDNNQDMVFIKWDSNIPKSYKLIFSLENKKGVLAEFLAFLAKMQINLLTINLSSDLNSAVDYFEITMEIPDNINPDSVKDRLKSRCKILDFTSLNDAYKES

SEQ ID NO: 1274 - protein, 443 aa, Campylobacter jejuni
MEIKSILIANRGEIALRALRTIKEMGKKAICVYSEADKDALYLKYADASICIGKARSSESYLNIPAIIAAAEIAEADAIFPGYGFLSENQNFVEICAKHNIKFIGPSVEAMNLMSDKSKAKQVMQRAGVPVIPGSDGALAGAEAAKKLAKEIGYPVILKAAAGGGGRGMRVVENEKDLEKAYWSAESEAMTAFGDGTMYMEKYIQNPRHIEVQVIGDSFGNVIHVGERDCSMQRRHQKLIEESPAILLDEKTRTRLHETAIKAAKAIGYEGAGTFEFLVDKNLDFYFIEMNTRLQVEHCVSEMVSGIDIIEQMIKVAEGYALPSQESIKLNGHSIECRITAEDSKTFLPSPGKITKYIPPAGRNVRMESHCYQDYSVPAYYDSMIGKLVVWAEDRNKAIAKMKVALDELLISGIKTTKDFHLSMMENPDFINNNYDTNYLARH

SEQ ID NO: 1275 - protein, 378 aa, Campylobacter jejuni
MKFCKKCVMPDTKPDLHFDEEGVCDACRSQEAKNQNINWQEREKEFFELIKKYKKHPVYDCVIGVSGGKDSTFQVVKMLELGLNPLCVCFEPSVPTKIGRKNLDNLNHLGVDLIHIKRDPKVYQKLAREAFIRTGDNEWQNHLGIFTSVPRIAVNFGVPLIIWGESPQIEYGGPASSKNKNILGREWLEEFGGLLGNRASDMLGVNGITEKDLFLYTYPSDEELQRVGVTGLFLGYYFKWDYKKILEISKKYGFLTLDHPVETTYENFENLDCYSNHVHDYLKYCKYGFGRATDNACLDIRLGYISREEGVRLAQKYDGKPPKKAIKKYLEFSGFSEEEFQKIVDSFTNKKIFKRDENGKFIRDYDGSLVRKDECVLK

SEQ ID NO: 1276 - protein, 653 aa, Campylobacter jejuni
MGLMMTFTPTQKELFNKNIEALSNLFLKESLKEIKSSKFELILGKDNLDINLKDTSDNTFLYENVIDELNSMLNTYNDKYLLYPVLYFYGFGNGILFKALLQNKNHQHIVVFEKDIEIIWVIFHILDFSNELQSARLMILQTSSLDIELFSNFCSSKPFFQFSRIYFLELMSHYYERFHEDVLELNKKLVQDFKDSILSHGNDPLDALQGIEQFVYNLPQMITHPSYKELLSKRKGISDTAIIVSTGPSLTKQLPLLKKYASKATIFCADSSYPILAKHNIKPDYVLSLERIPLTSEFFNNDFGEFDKDILFVLKSYVHPHTTKYLQKNNRNFMLVSTYASFINYLKLDDFGYFNMGFSVANMNFLLAIHLKHKNIVLIGQDLAYAKDGLSHTKDYSNLDKHEGHFQRDKNKYTTQAYGDNGKVESSFVWTLFRHNFEQDVANAKKNYYITTYNCTEGGARIEGTIEKPFLWACENLLHKDLNKPFEKLEPLSLNKQNEFLLKAYYKVYQSIKHCRDFSNKFIKSYDKIKNSFMSLQNSQENETLIKEIIKDIDKIKTQIDELYNTQKDLMQILGPLLTQFELNLARIYVLNPKTKEDAFNKSILWIKEHLEFMELVYGHIKAQENALIKNILPLEEKLKERKLDKWMERVRR

SEQ ID NO: 1277 - protein, 572 aa, Campylobacter jejuni
MGFRINTNIGALNAHANSVVNARELDKSLSRLSSGLRINSAADDASGMAIADSLRSQAATLGQAINNGNDAIGILQTADKAMDEQLKILDTIKTKATQAAQDGQSLKTRTMLQADINRLMEELDNIANTTSFNGKQLLSGNFINQEFQIGASSNQTIKATIGATQSSKIGLTRFETGGRISSSGEVQFTLKNYNGIDDFQFQKVVISTSVGTGLGALAEEINKSADKTGVRATFTVETRGIAAVRAGTTSDTFAINGVTIGQVAYEDGDGNGALVAAINSVKDTTGVEASIDANGQLLLTSREGRGIKIDGNIGGGAFINADMKENYGRLSLVKNDGKDILISGSNLSSAGFGATQFISQASVSLRESKGRFDANIADAMGFGSANKGVVLGGYSSVSAYMSSAGSGFSSGSGYSVGSGKNYSTGFANAIAISAASQLSTVYNVSAGSGFSSGSTLSQFATMKTTAFGVKDETAGVTTLKGAMAVMDIAETATTNLDQIRADIGSVQNQLQVTINNITVTQVNVKAAESTIRDVDFAAESANFSKYNILAQSGSYAMSQANAVQQNVLKLLQ

SEQ ID NO: 1278 - protein, 572 aa, Campylobacter jejuni
MGFRINTNVAALNAKANADLNSKSLDASLSRLSSGLRINSAADDASGMAIADSLRSQANTLGQAISNGNDALGILQTADKAMDEQLKILDTIKTKATQAAQDGQSLKTRTMLQADINRLMEELDNIANTTSFNGKQLLSGNFINQEFQIGASSNQTVKATIGATQSSKIGLTRFETGGRISTSGEVQFTLKNYNGIDDFQFQKVVISTSVGTGLGALADEINKNADKTGVRATFTVETRGIAAVRAGATSDTFAINGVKIGKVDYKDGDANGALVAAINSVKDTTGVEASIDANGQLLLTSREGRGIKIDGNIGGGAFINADMKENYGRLSLVKNDGKDILISGSNLSSAGFGATQFISQASVSLRESKGQIDANIADAMGFGSANKGVVLGGYSSVSAYMSSAGSGFSSGSGYSVGSGKNYSTGFANAIAISAASQLSTVYNVSAGSGFSSGSTLSQFATMKTTAFGVKDETAGVTTLKGAMAVMDIAETAITNLDQIRADIGSVQNQVTSTINNITVTQVNVKAAESQIRDVDFAAESANYSKANILAQSGSYAMAQANSVQQNVLRLLQ

SEQ ID NO: 1279 - protein, 607 aa, Campylobacter jejuni
MTILEKNIQALLSGVNEPLGNKLLNFIQNKTCSRFNIDENLNIFDKTHNVFMYENLEEEINFFYQSILEKTPRYPFICIYGIGNALLIKNLAKHYKHLFVFESEIELFILALSTIDLSEELCSGKIYLVDIEEERVDIQLLILFDMKDMFEYLSLYEMFVNNVYYKKFYEDVWHKADELCEKNIKVVIRNLNSSLCIGFECYSHLLQNIPSMLESIPFQRILSERKNKFENAIVVSAGPSLAKQLPLLKAYQDKAVIFCADGALSMLEKEGIIPDYVTNLDFTDLAMKFFQNKENKTSLNMLSCATHPSLVHFLDNKSVVLRDDPLYQRFNLNDFGYIDTGTHVSHFSYTLALALGFKNIIMIGQDLAFDEEGNSHSKGFDFGEKFSGEENIDKLKVTAYAGKGEVLTHITWNDYRIKLEYLFACNEQKAKFYNATEGGARINFTEELSFKECCEKLLTKEKPQFELPKSLTKNRSDKLLVKFKEKIQKDQDNAKRFLDDALALKQILENILSKDFILPLEFLEKVYQNIENFNHSLDEDEFIQDGILKAVMYERGLKISLVYKENIIDNASFISAYIKAYHEWLLYFMEKLEQRINIIIDSFKELP

SEQ ID NO: 1280 - protein, 413 aa, Campylobacter jejuni
MIVSKAYEIDSCDDVELGIKRESKLEFKLWYDDEKTPEALVFVVQGMGDDISSIQYVGDYMVRQFNTAVVGVNYHCIGNRPQTGSSFFMDDIDKLILKASCEAADIKLPYDVDKIQDYKAMSEIFHFVNNQIVEGKQKGNFTPNYFLNLHVSLQPTKNEYQNFGIMQAQDLLNVALYLKKHAPFDTMGGGIPIIMIGGSHGGYLAHLAAKIAPWLVDGVLDNSAYAKFLWRVVGFGKEIDFMQYSEFATFDFFHHIKTHCSTKTFWTSNSSSPRFFSPARRKIRNLLEEDHLLKQSKCLKTCFISYHSLYDEYVSLKEKTMFYEELEKLGFDVTLHSITKESQVDGKFIKNLNHGMGIPVKLLIKKELPLMLEKIKQNSKKDYKEKCISYPCEDLLYQFSEKDDKMSLKIDKI

SEQ ID NO: 1281 - protein, 356 aa, Campylobacter jejuni
MILFGSTGSIGVNALKLAALKNIPISALACGDNIALLNEQIARFKPKFVSIKDSKNKHLVKHDRVFIGQEGLEQILTECQDKLLLNAIVGFAGLKSTLKAKELGKNIALANKESLVVAGSFLKGAKFLPVDSEHAALKFLLEGKKNIAKLYITASGGAFYRYKIKDLNQVSVKDALKHPNWNMGAKITIDSATMANKLFEIIEAYHLYDFKEIDALIEPRSLVHAMCEFKNGASTAYFSKADMKLAISDAIFEKQDTPILEAVDFSKMPALKFHPISTKKYPIFKLKNTFLKEPNLGVIINAANEVGVYNFLENKSGFLDIAKCIFKALDHFGVPKISSIEEVFEYDFKTREYLRS

SEQ ID NO: 1282 - protein, 601 aa, Campylobacter jejuni
MKSVIIGTAGHIDHGKTSLIKALNGFEGDSLKEEQERQITINLSFSNLKLKDKNISFIDVPGHKDLVKTMVSGAFGFSVCLFVVDINEGLKEQSLEHLEILKILDIKNIILVLSKCDLCENIEQKSVEILEELKNLDYPILKVFHTSIKNNQGIEELKNYLYTIENKENDEELIFHYYIDRVFSLKGIGTVVTGSLNEGSITLNEKIICLDTQKELIVKNIQNHDTNLEQIKACNRVALSLNCDYKELKKGYLLSKKGYFKAFKECDALVKAKNLQNSKMIFCVGSRQIECKINILKKLENDEFFVHFSFDKNVFLSFDEAFILLQNNRVIGGGKVLNPLSEPLKKEQKNKFLMFLKNKDFKAAFSFLKDAHKYGFGLLSSYQRFKLSHQKALKLAKELNQVFVDEKNLNVYHLQSLEEIKNFIKFILEKNPYAMLSAHSLALRITWASENFCELGLKEMSNLLDFQNGIYFKKGIDFEKLQEKNNNQMYEILKKQGIKPEAPYNLYDFLELDRKSGDNILKKLTQKGLVVRLSHNLFIEKQALEKLMQECLNLLKNQSLDVQSMKEYFNLSRKYAIAYLEYLDKFPQVSKEAEKRFLTNI

SEQ ID NO: 1283 - protein, 236 aa, Campylobacter jejuni
MKKLSLILVCSASLFAASNSEISDFYSKSIKAQFPNATVSVSNRQKVGNTGFESVIVSVELNGQKQENILFTKDSLITPDLIDLKTGISYAQEYEMKKFQEARENFTKNAKAVAQKETMVIALGDKNKPAIYVFSDPECPYCREHLAQIDDELKNYQVNYILTPVHGKSAFEKSALIYKEAKKAKNDKEKIAILNKYYDANIKNYPKVSDAELKEVFSLYEKYRSLGLSATPTIIK

SEQ ID NO: 1284 - protein, 625 aa, Campylobacter jejuni
MLNPNSAIERVKNHLAYKLGQTVIEHRHNGGGYIALFKKLYKIKKQHKKEQKIYQQIIQVFPQLKYPSLETCSDYNEALRCKFHLSYMIGEVLIKAYQNWYKGGGFKLKNNIKKANKEFQIFREILKEFKELNGETLKAIQDNKQLFLKEFPRIKNILKTHQDYQPILDNIFHNFNYFIKNFDLIEEWLLSDDFKEKYKKENHPYPSLLDPKKLNDENEKINYHNIPAELAWKMNLPLPPNYEFVGFFLHTSGEKAMERFLKEVGVVLIGAFGYEDGKRYISIFNFLISEACACNDLKFAIGILDVNCQKYDKFCFLLQNKPVLILLRDPIDSLKSFINVRHQKNGFNEILKIDINNTDFDKINDRIVYVHESNGCFNPDTNQKFPSLESIKALSDTNHWMLMYNIRRNKTIEFFRFNKIIYIDMMDIVGDKTLFTLEKLSKILNFSSPDKNNKIFYQQLYSPLTVLLPCIIKVNNKVKIFVSNRFSVKNIQIMENCIDITDKFKEIFHENLIIFCSKDHFDSLINNQTLYNVVLEYINKFLISLKKRINVEKNKEVKVDDVLDYFKKNISVAKSYKDILDEELVYIKQHRPDIVASWKYYQEFERMCKELDENNQNPSLSFSNQ

SEQ ID NO: 1285 - protein, 283 aa, Campylobacter jejuni
MKKEQLEVLKEALNGLIYQIDNHQQARKPIADVERIISELQVLNHWNKQENVYNALHLIQGAIADPQGLGRLNLLLDNARIPKQYYDIFYKMLYVDKYGGGDGYRPVCIDCGGHAGLITDIILHCGGQSYIFEPNIYLNYFLRKKYENNINVKLFQKAVSDRNYETDFIMFGNRILSQGNRIVESVQDSQTEKTYKVQVIDLCEFIENEILTQHKRIYFLKLDIEGMEFEIMKKIIEKKIYKKIDYIACETHEYMFDDSEKKIGELKQLINKCNIQNILLDWI

SEQ ID NO: 1286 - protein, 113 aa, Campylobacter jejuni
MKVDNFLNTYSMNSALLDRAAKARSLESSIKINDNDIVTKSKEDKALKEQTNAFEAFFLKQVLDVSLKSQNSLFGKDASDEIYSSMYNDTMSKALSGGMGFSKLLYDFLKERG

SEQ ID NO: 1287 - protein, 608 aa, Campylobacter jejuni
MGIFGTLYTGVTGLKASEVQIATTGNNISNANATFYTRQRVVQTTNGYITTGGVQVGTGTAVESIVRLHDEYSYYKLKGASTQLEYTKYMASTLQEIAQRFPDLQNTGILQDLENYNKAWNDFASNPNENATKIALVKASQTLTESVNNTFATLDKIQKKVNDDIKNTVDEINRIGEEIATINKQIYGQEALPTEHANELRDRRDELELTLSKLVSAVASKNEINQDNRLDTTITDPGHQYNLSIEGFSIVDGINFHPLKLDYDDKNKSYSIYYETPDEKVRDLTAKISGGQLGAQLDLRGRNYSKSEGKYEDGIIQGYMDSLDTFAKTMINETNNLYASSAKSSVTSDYLSGLKGDIPLVNYDRTIQPGSFDIVIYDDKGDKKLTKTITIDVNTTMNDIMRQINANTDDNDNKNSNDDVDDHINASFSYDAKTGDGLFQINAKSGFKVAIEDKGTNFAGAFSIGGFFSGTDASDMKVKDSILNDPSTVRASSNGVDSGNDMANKIIQLQYKKVNFYNEDGTIDNLTMEEYYRKLTGKIASDGENNNVVNSSNETLYNSVYSEYQSKSGVNTNEELAALIQYQSSYGAAAKIVSTVDQMLDTLLGLKS

SEQ ID NO: 1288 - protein, 472 aa, Campylobacter jejuni
MIRLILILINILFCHYLYALDCQKRLFDISINEKLSIQESLDELAKYCSFSIIVKDKIAKEKLETLQNSVNIHQMSLDEIFNFFIKEHDLSYDFDGKILRISGINTKIFKISYITSIREGQSITKASVDAKPRQSEYSGSFDDAEDNMIKSMEKFDFWQNIEKEIIVLLKNSHEDYEAKTPIINPNAGLIIVTGTNSQLKSVKNYLQKLENRLKKQVIIDVSILAVSLNESHSSGINWQNFNIGLNSQVNNENSFIQFQNGQGFVKNLGLRANLNFDSIINFLSQNGKTSVLSNPKLMALNNQQAIISVGDTINYQVKESSKGTENGTTVSESYNNYSIFVGILLNILPEISDDGKIMLRINPSLSDFKYPEDNKRQKEPRTIAPDTIQKKLSSVVQVENNQTLILGGLISHDKSNEKNSINFLSKIPILGSLFKGEVLNSKATEIVFIITPSIVDSVNAPSLKDLGFKHYE

SEQ ID NO: 1289 - protein, 319 aa, Campylobacter jejuni
MKKIFLCLGLASVLFGADNNVKFEITPTLNYNYFEGNLDMDNRYAPGIRLGYHFDDFWLDQLEFGLEHYSDVKYTNTNKTTDITRTYLSAIKGIDVGEKFYFYGLAGGGYEDFSNAAYDNKSGGFGHYGAGVKFRLSDSLALRLETRDQINFNHANHNWVSTLGISFGFGGKKEKAVEEVADTRATPQAKCPVEPREGALLDENGCEKTISLEGHFGFDKTTINPTFQEKIKEIAKVLDENERYDTILEGHTDNIGSRAYNQKLSERRAKSVANELEKYGVEKSRIKTVGYGQDNPRSSNDTKEGRADNRRVDAKFILR

SEQ ID NO: 1290 - protein, 200 aa, Campylobacter jejuni
MKKILQDGFFLAIFFFVLLPSRVFALDAVLFNENILSQKVSNEINLIGKELYQKSNIFIGVMVGDKTEIETLLNKQKELPQSYILLLLSKNSHKVDIVGSKGALALIDKEAVLSPYPGTGSILPILATNKGDIYNAAILNGYADIVDRVAKSLGLQLEHSIGNANRDTINILRILIYGFICFALLYYAQRRIKRKKNVRN

SEQ ID NO: 1291 - protein, 402 aa, Campylobacter jejuni
LNSFKQKYLINFWDNSRSMIALGILSAVYFGIFGGVWAVTGEMTRWGGEFLELLGMNLDGYSYYQKQNLNGTPLTRTDGIMLIGMFIGCLVAALLANKVKFRLPASNIRIFQAIVGGILSGYGARLAFGCNLANFFTGLPYFSLHTWLFTVFMVLGIYLGVKICNTSFFKPKAKLERVNKENLPLNKQSLRTKLYFNLGILLFIAFLVWVFYLVFTNGNISTQNKQSLLALALIFGFVFGFVISRGQICFTSCFRDLFLFGRDNAIKGALIGMIIASLIAFAFILQGHTSKLIELSPAVAVGAFLFGFGIVFAGGCECGWTYRAFEGQSHFIIVGIANIIGTMILALSYNFLPKAFKEGIKINLLTEFGNLNGFFINLILFILMFVFVVFYKKHFFKNQLKG

SEQ ID NO: 1292 - protein, 700 aa, Campylobacter jejuni
MFKSLNIGLKLIFSVAAVVVIGLVILISLITKQVSQNITKNTEDILASITKEYATQTQGIFGEMIALNKSISGTLTEMFRSTSKEDLDIDNITNIITNTFDNSAYSNFTYLYLIDPPEYFKEESKFFNTQSGKFVMLYADEEKDNKGGIKAIQASDEIANLQVVQDILKKAKYGENKVYIGRPIKMNLEGQDFDAVNVAIPIFDRKNQVVGVIGMTLDFSDIATYLLDPKGQKYDGELRVLLNSDGFMAIHPNKNLVLKNLKDINPNKGAQETYKAISEGKNGVFNYIASDGDDSYAAINSFKVQDSSWAVLVTAPKYSVFKPLKKLQLIILGASFIFIFVVLGVVYYCVRKIVASRLPVILSSLESFFRFLNHEKIEPKAIEIRANDELGAMGRIINENIEKIQISLEQDQNAVDESVQTAREIEKGNLTARITKNPINPQLVELKDVLNRMLDVLQSKIGSNMNEINRVFDSYKALDFSTEVFNAKGEVEITTNILGKEIKKMLLASSNFAKDLANQSEELKNSMQKLADGSNAQASSLEQSAAAVEEINSSMQNVSGKTVEVASQADDIKNIVNVIKDIAEQTNLLALNAAIEAARAGEHGRGFAVVADEVRQLAERTGKSLSEIEANINILVQSVNEVAESVKEQTAGITQINDAIAQLETVTKENVEVANVTNNITNEVNQIAAAILEDVNKKRF

SEQ ID NO: 1293 - protein, 933 aa, Campylobacter jejuni
MSSVGENIKLTRRSFLKMAALSSLATPLLARSETLREASADELKEAYEGSKKVKTVCTACSVGCGIIAEVQNGVWVRQEIAQDHPVSSGGHCCKGSDMIDMVRSHVRLKYPMKKENGEWKRISYEQALSEIGEKLAAYRKENPESVMFLGSAKLNNEQAYYIRKFAAFFGTNNVDHQARIHSATVAGVANTFGYGAMTNHLGDIQRSKCIIIIGANPAVNHPVGFRHFLKAKEKGAKLIVVDPRFTKSAAKADIYARIRPGTDIAFMYGMLKIIFDEGLEDTKYLDERVFGIDKIREEAAKWTVEEVENVTGISKELLVQITHEVAKNKPTTLIWAMGLTQHTVGTSNTRLAPIVQMVLGNIGKFGGGVNILRGHDNVQGASDMACLSENLPGYYPLNEATWRYYAKIWGVDYEWLLGNFVSKDWMHKTGLSLARWWAAALNGKDGNDAIDNAGTPLKALVVMGNGITSTAQQVKVKEGLEALELLVLADPFVNEAGIIAERKDGIYLLPAATQFETSGSVTATNRSGQWRFKVVDPLYESMEDQEILFELAKKLGFYEDFTKTLRDEKGEIVWPENATREIAKAVRSIGLNGWSPERLKKHTLYWDKFDEVTLEGKDEVAGEYYGLPWPCWSDKHPGSPVLYNTDIEVAKGGMGFRNNFGLEYEGESLLAKNAPLNSPIDTGYPQITKDNIEKVLGITLSAQEKEKMGSTWSYDDSNIIATKCIEKGIVPYGNAKARAVVWTFKDKIPLHREPLHSPRNDLVQKYPSFEDQKALYRVDTKFVSVQQAKDYSKEFPLNLVTARLVNLNGAGMENRASMYLTRLTPEMFCEINPELAKEQDIKAGDMIWVHSPEGTKIHVRVKVNPGVAKDMIFLPFHFTGVMQGVDLTHNFPEGTKPYASGESANTVTNYGYDIMCQIPETKGGLCRISKDGK

SEQ ID NO: 1294 - protein, 192 aa, Campylobacter jejuni
MKNILLLNGAKEFGNSKGQLNLTLHNHALEILKTLGYEVDQTHIDQGYDPKEEIQKFIKADAVIYQMPAWWMGEPWIVKKYIDEVFGLGAGVLFKNDGRTHENPSKNYGKGGLDHGKKYMFSLTWNAPLEAFNDKNEFFEGKGVDMVYWHLHKAHEFIGMKALPTFMCNDVVKNPQVEKYLNEYELHLKKIF

SEQ ID NO: 1295 - protein, 488 aa, Campylobacter jejuni
MIRTVMDFKFVLRLLEANQFENEVVEYKKNNKDFIVLGKNISALSNTAALLGIDKAYIIFGIEDGTLNIVGTNFKPKQEKKGNEELESWLHKVLKPNIEFKIHEITEKEIRLVVFEIEATKISPIKFEEKAYIRIGSNRKELDKYPEKEKKLWQVLSGFSFENEIAKSNLNIQDIYDLLDYSKCFDMLDISYDNYSSDEYIIEKLIEHGLVKNLNDSFAITNLGAILFAKDLTKFKGLNRKRIRFIRYQGKNKIHTLEELEGRKGYAIGFQGLISYIMQYVPKNEVIENAIRKDTTLYPEIAIRELVANAIIHQDFTINGRNPMIEMYSDRIEITNNGKSLIDIKRLIDMPSKSRNDKLANLMRIMGICEERGSGVDKVIDSVEAYQLPAPDFINNEDYFQAILFSHMPLEDMTKQDRIRATYQHCCLKWASREAMTNASLRARFKIGDKQHSKASKIISDTLEAGLIKQQDPENKSTKHVKYVPFFV

SEQ ID NO: 1296 - protein, 500 aa, Campylobacter jejuni
MAKKKEIKLEDALWKSADKLRKNIDAAEYKHIVLGLIFLRYISDSFMQKYEELLKEQDDGADPEDADEYLADNIFFVPEKSRYNYIRDNAKNPKIGKMLDEAMDEIEKHNDTLKGVLPKVYAKDNLDSKCLGELIDLIGNIAFDTGKSTDVLGHVFEYFLGEFALAEGKQGGQFYTPKCVVELLVTMLEPYKGRVFDPCCGSGGMFVQSEEFVKSHQGRLDDISIYGQESNQTTYKLAKMNLAIRKIESSQVIWNNEGSFLNDAHKDLKADFIIANPPFNDSDWSGELLENDGRWKYGVPPASNANYAWIQHFLYHLSPNGGVAGFVLAKGALTSNTTNEAAIRKALIEDDLIDCIVNLPAKLFLNTGIPASLWFIRRQKLPKTVKKTLFIDARDLGTRINRRNKTLNKDDINQIANIYKAWKNGTDYEDIKGFCKSVSIDEIRELSYVLTPGRYVGLADSDDEFDFDTRFNELLAKLKSQIKTEQELSEIILKNLEKIK

SEQ ID NO: 1297 - protein, 662 aa, Campylobacter jejuni
MLKITKIKRKIMNSIKIKLSLIANLIAIFALIVLGIVSFYFTKTSLYESTLKNQTDLLKVTQSTVEDFRSTNQSFTRALEKDIANLPYQSLITEENIINNVGPILKYYRHSINALNVYLGLNNGKVLLSQKSNDAKMPELRDDLDIKTKDWYQEALKTNDIFVTPAYLDTVLKQYVITYSKAIYKDGKIIGVLGVDIPSEDLQNLVAKTPGNTFLFDQKNKIFAATNKELLNPSIDHSPVLNAYKLNGDNNFFSYKLNNEERLGACTKVFAYTACITESADIINKPIYKAAFIQAIVVIIVVVFSVILLYFIVSKYLSPLAAIQTGLTSFFDFINYKTKNVSTIEVKSNDEFGQISNAINENILATKRGLEQDNQAVKESVQTVSVVEGGNLTARITANPRNPQLIELKNVLNKLLDVLQARVGSDMNAIHKIFEEYKSLDFRNKLENASGSVELTTNALGDEIVKMLKQSSDFANALANESGKLQTAVQSLTTSSNSQAQSLEETAAALEEITSSMQNVSVKTSDVITQSEEIKNVTGIIGDIADQINLLALNAAIEAARAGEHGRGFAVVADEVRKLAERTQKSLSEIEANTNLLVQSINDMAESIKEQTAGITQINDSVAQIDQTTKDNVEIANESAIISSTVSDIANNILEDVKKKRF

SEQ ID NO: 1298 - protein, 511 aa, Campylobacter jejuni
VLRWFVLLFLLFLNLEAKIPKDTLIIAVENEIARINPAYSEDHDAVINLVFSGLTRFDENMSLKPDLAKSWDISKDGLVYDIFLRDDVLWHDGVKFSADDVKFSIEAFKNPKNNSSIYVNFEDIKSVEILNPSHVKITLFKPYPAFLDALSIGMLPKHLLENENLNTSSFNQNPIGTGPYKFVKWKKGEYVEFKANEHFYLDKVKTPRLIIKHIFDPSIASAELKNGKIDAALIDVSLLNIFKNDENFGILREKSADYRALMFNLDNEFLKDLKVRQALNYAVDKESIVKNLLHDYAFVANHPLERSWANSKNFKIYKYDPKKAEDLLVSAGFKKNKDGNFEKDGKILEFEIWAMSNDPLRVSLAGILQSEFRKIGVVSKVVAKPAGSFDYSKVDSFLIGWGSPLDPDFHTFRVFESSQDSALNDEGWNFGHYHDKKVDIALQKARNTSNLEERKKYYKDFIDALYENPPFIFLAYLDFALVYNKDLKGIKTRTLGHHGVGFTWNVYEWSK

SEQ ID NO: 1299 - protein, 386 aa, Campylobacter jejuni
MKSARKNKNIIIDQNEFGILSLIKEGLLGTCTHLMNEKEVNEIIKSGKFKGESFPYPLSFAPKNAEEALNDIKSGDRIDLMLDEKVVGHIDFKSQFKNNKNFSDIFSPNTCSLEDMGTTCISGKIEIYNSQIEKIKENFQQIKNNLNAQKITAIVSSFDPLHRAHERMFRWTIDKADLVVIFLVESFDVNGFEFELKEAYLKKFIQNYLPPDRIFIFPLKNINIFHAHLNPGLESIIAKSLGCTKLVVGQNHTGLGMFYDDNQPKTILDDFSKDYGIEVIVLPEFVFCDQCRMIVSTRSCPHGCHHHLHYNSQSLKDLLRAGIIPPAIFIRKEVSSVILTSLFPNRLKNMQKIYNELFPTDGILEYKNDEEFYQKLLEIHQMSYMV

SEQ ID NO: 1300 - protein, 336 aa, Campylobacter jejuni
MSNFKIQGRQMKEFYMNLALNEAWKYQFLTYPNPAVGCVILDKNEKILAIKAHEKAGLAHAELNAIAHAFKSLRPEISLPKEANALHEFICKNHQGVFKDSIAFVTLEPCSHQGKTPPCAKLFSELGFKKIFISVKDENKIASGGAEFLKKQGIEVEFDILKEEGKKLLKPFLKWQKGQFKLFKLALSMNGSPFGKIVSNELSRTYAHEIRAVIDLLVVGGETIRKDCPILDARLCKAKAPNLCILSRQNIDNFDKNIPLFKVPNRQIYTQIPSEAKFLMYEGGENFLKIFKDEIDMFLIFQSSSLNDEKNVTIPLNFKPLYRNFLGSDTYGIYEL

SEQ ID NO: 1301 - protein, 362 aa, Campylobacter jejuni
VNTFGTRLKFTSFGESHGVAVGCIIDGMPAGVKFDEEFLQNELDKRKGGSKFATPRKESDKAQVLSGVFEGYTTGHPIAIVVFNENAHSKDYDNLKDLFRPAHADFTYFYKYGIRDHRGGGRSSARESVARVAGGAVAAMLLREFDICVQSGVFGVGTFVSNLKEEEFDFEFAKKSEIFCLDPKLESDFKNEILNARNSKDSVGAAVFTKVSGMLIGLGEVLYDKLDSKLAHALMGINAVKAVEIGEGINASKMRGSCNNDALKDGKFLSNHSGGILGGISNGENLILKTYFKPTPSIFAKQESIDKFGNNLKFELKGRHDPCVGVRGSVVASAMVRLVLADCLLLNASANLNNLKNAYGLK

SEQ ID NO: 1302 - protein, 220 aa, Campylobacter jejuni
MKTRILAIFFIFTSLLYADENPFKTDQNITLVAPPEFQKEEVKFNSSARILKSITFNYINLDGSEDKIDLDVNKSIDWHDTYTISRFKSPDPSKVLDVSVTIPEKNSSKQESNSTANVEIPLQVAKIYDFISYAVYKNKIKLNTSDEMITDFSVGNPSKIVIDFRSKMISPTKNIRLSNSIFKRIDFGSHKGYYRLVIYLDGTYNYNIQKDATGYMINLL

SEQ ID NO: 1303 - protein, 928 aa, Campylobacter jejuni
FFEGKNTNIQTFNNSGFISANKGVDIGNIGTIKNFNNNGTIQGSEVGVAINTKIDTFTNNGFINSPGSGQWNNGIWISSNATIEKLVNNGTIKGGHSAIMVTSQHIKTVENTGIIHAEGEWGSSILLEYGGFIEHIINTGTISNNNVGIGSAYGVFGTLTIKDGGMVYGKYSAIGVGRSQTLGDLYIDGRSNNGTVSGIYSEEHGILLENNSRTQKIELKNGGIIKGNIDGIRLINSASLSGEMILSGEGSRVEGGRGVGILNRSGKIEGSIKVEDGATVTATSNRAIANSGSGSITGGITVSGKNTKLEGNIINTGNASIGSDIKIEGGAKVEGGLVNQGNGSISGSVQVSGGSSIDSITNEGNGAISGSITVYKDSKLDSITNTSTSSTGISGSITNNSDNKLEISNSGNIGGKIESTGSADMVISNSNGGTISGGISSSGSGSTSISNSQGSTINNGITVSGSAQVEISNQGSVGKDENGNTVTNNGSGSVGIKDWLVSTDKNTGKLNTVVIGGSRAFNVKVENITVDQSNVDLEELNDINNIISGVNQNNIGNIGTNGSGEISLSFDPITGKLTTDFNLNASISGATFRSLISTTSRRSTFIDNVMGNSMQSFALASSSKSQSIAMSEKGNLYADASDYIKSDLNNGSYGSNKEHSLFILPYTSSQNVELSLNEESKGHTKGTIIGYSTLKDSGIYGVYAGYEDTKMGSTYFDINNRTYYAGLKYFNTLFTTEKGQEVYIKAQGKAALIKNDLTEKIGNNEAKAEPNSYAYGVNTALGMNFISNKDIFSPEIGLAYEGGYTEAFSMKDTIGQATVKGGERTYANYLNLFSTKTSLTWFRDWLPNLKTSVELGAKFNINPKVEAEARFGNIKVSDEFDLPRVQKFVSTSFIVPVNEAFYFSLNYNGMFDKDGNTHTGFAQFNYLW

SEQ ID NO: 1304 - protein, 61 aa, Campylobacter jejuni
MAKKSMIAKAARKPKFKVRAYTRCQICGRPHSVYRDFGICRVCLRKMGNEGLIPGLKKASW

SEQ ID NO: 1305 - protein, 358 aa, Campylobacter jejuni
MKTYKVAVLAGDGIGPLVMKEALKILTFIAQKYNFSFEFNEAKIGGASIDAYGVALSDETLKLCEQSDAILFGSVGGPKWDNLPIDQRPERASLLPLRKHFNLFANLRPCKIYESLTHASPLKNEIIQKGVDILCVRELTGGIYFGKQDLGKESAYDTEIYTKKEIERIARIAFESARIRKKKVHLIDKANVLASSILWREVVANVAKDYQDINLEYMYVDNAAMQIVKNPSIFDVMLCSNLFGDILSDELAAINGSLGLLSSASLNDKGFGLYEPAGGSAPDIAHLNIANPIAQILSAALMLKYSFKEEQAAQDIENAISLALAQGKMTKDLNAKSYLNTDEMGDCILEILKENDNG

SEQ ID NO: 1306 - protein, 865 aa, Campylobacter jejuni
MMRSLWSGVSGLQAHQVAMDVEGNNISNVNTTGFKYSRADFGTMFSQTVKIATAPTDGRGGSNPLQIGLGVSVSSTTRIHSQGSVQTTDKNTDVAINGDGFFMVSDDGGLTNYLTRSGDFKLDAYGNFVNNAGFVVQGWNINWDDQTIDSSRTPQNIFIDPGMHIPAAKSTEVAIKANLNSGLNIGTSSRNLYALDSVHGWNTKTQRAEDENDTGTTQFYTTSKNSVEVTEKGVDAGSLFNAKGQGLNLRDGQGIWVSYADATYSTNKVGVNAFDPNLQQNQTAAFWGTANQKVNLDITLNGVRIQNADIQSIDDAIAYINTFTAPTDTRDGTGVKAVKNKDGSGIDFVNDNADGTTDNMKNINLVVANTNTAGELWNAVWNNNNQTFTFNNNGNGQAGTPTINKNGSSLWTATNITFTPQPPQAATNVQLTGGLNAQIITAHKYIYSSNPVDIGPMYNPDGGPAFQPGANATTRPTEPGSAAYWDAVNGGLLNTNVRTFRTTEDLRELLQRDARYGVDYDGSGTFAAADINQNIKVVVTADGHFAISNANEQSTVPPNAINGVGNATTTDPKNMSFNITAYSNKQGTVSTNDAFTAIFKAFDGPLVIGNQIKESEQLKLSAFSAGLEIYDSLGSKHTLEVQFVKQSTTQDGGNEWQMIIRVPEPAEINTTGEGPNNIIVGTARFNNDGSLASYTPRTINFSPNNGAAPNQQIKLSFGTSGSNDGLVSSNSASTLTGQATDGYTSGNLKPDAIRVDDKGNILGEFTNGKTFAVAKIAMASVANNSGLEEIGGNLFKVTANSGNIVVGEAGTGGRGEMKTSALEMSNVDLSRSLTELIIIQRGYQANSKTISTSDQMLQTLIQLKQ

SEQ ID NO: 1307 - protein, 47 aa, Escherichia coli
VKMLIKSKLKMQKIISLAILLSMKFQLANFKNATNNSTEQKVLKVAL

SEQ ID NO: 1308 - protein, 12 aa, Escherichia coli
KKANTIMKNGFG

SEQ ID NO: 1309 - protein, 13 aa, Escherichia coli
QSINSPLKPILAN

SEQ ID NO: 1310 - protein, 23 aa, Escherichia coli
SSFALERGSFGYFGTLFFNLLVI

SEQ ID NO: 1311 - protein, 11 aa, Escherichia coli
VLVLERVRGII

SEQ ID NO: 1312 - protein, 32 aa, Escherichia coli
VVGFVNWLVLLKNRPFVFCQGSMYWEKQDLIM

SEQ ID NO: 1313 - protein, 53 aa, Escherichia coli
PYAVQIQGKLLIYLIISLKISHFYPTLQAQETPMKPYALQGFQESLVVENLSK

SEQ ID NO: 1314 - protein, 21 aa, Escherichia coli
LCKFDGKIRSSRARVKNNETS

SEQ ID NO: 1315 - protein, 24 aa, Escherichia coli
YYGGGYTNYHDRGFSRGIFSAFGS

SEQ ID NO: 1316 - protein, 20 aa, Escherichia coli
NLIEKAEIIYSKNLPKKAWL

SEQ ID NO: 1317 - protein, 30 aa, Escherichia coli
MQACLMAMLGRAFLLMRGVKEIAKNGQGLL

SEQ ID NO: 1318 - protein, 34 aa, Escherichia coli
CDFGFARTKKKRFSFGGYGLFDAALPRRTYERTS

SEQ ID NO: 1319 - protein, 22 aa, Escherichia coli
WSAWNLGWEISKNSPKLQNKNS

SEQ ID NO: 1320 - protein, 137 aa, Escherichia coli
AFIMLSLSTAKTPLNSLKVQIKIPSLKCVFSLSFGIVFVIKTAISLFAAMLSSLSLSSHSLLNSLVRLLSYKILPQIFPKLSFTICRQSAPFTPFGTSFTSSLKYSLCMYSSMSSSAASPWSCCEPCSILRCASSSF

SEQ ID NO: 1321 - protein, 35 aa, Escherichia coli
FGFFQGPYFTFMYSLGSKFCCGEAKYSGFNDGDLL

SEQ ID NO: 1322 - protein, 31 aa, Escherichia coli
FLTSSFLVILSIQTTTIKERKTINKEGKAAS

SEQ ID NO: 1323 - protein, 36 aa, Escherichia coli
GLSSNLRARIRPKTAPTSPMVGQVSPNTIQYSAHSL

SEQ ID NO: 1324 - protein, 51 aa, Escherichia coli
FVKALRFNFSKNKSSSKILLNKSSLKSFKKYSSLALQKALNSLKFLSLWKM

SEQ ID NO: 1325 - protein, 79 aa, Escherichia coli
IVAPRFLASSYSSKTKAPAPSPMTKPSLSLSNGLEACCGSSFLVDKAFIEAKPPIPTGQIAASAPMTNIFLAFPKAILL

SEQ ID NO: 1326 - protein, 107 aa, Escherichia coli
LKSFSSFFCLAFKSLCKIRSEYLLIGLVKCEYLSKPKPKCPALTLEYSAFFCALMMSLSTSALKFNSSAKACMSRMSSGRLGLKFTSMPNSRNSFKSLSIFLTSALK

SEQ ID NO: 1327 - protein, 124 aa, Escherichia coli
SKKGKRFKEKAMGYKNINTSPKITTVPTAKIPLKGSLFKLDSSAKTAAAPQIALPAPTSIEVSLSSLKIFVPTNKAIIKTKNITIAESKNPFNPTLKSSVKVILKPYKTMPSLKSFFALKCTPA

SEQ ID NO: 1328 - protein, 27 aa, Escherichia coli
KILCKTTGSPTIKMLSFGSRTKDGFTK

SEQ ID NO: 1329 - protein, 53 aa, Escherichia coli
FSITAIFNFLFAFKFGTVLINSIFALVLSILSYPAIASYKIAASSTFCVKTPI

SEQ ID NO: 1330 - protein, 46 aa, Escherichia coli
FLTKVAPPPKILSSAKLKLGKTQELIPKKQFLPIFTLPAHLAPTLT

SEQ ID NO: 1331 - protein, 69 aa, Escherichia coli
ILSLAPPLALCAFASIFSFEIAKISTFTPLLTMISLAKSSKAFPPSISHKSGGGILSKSKALRVKTSRI

SEQ ID NO: 1332 - protein, 47 aa, Escherichia coli
IVTKEQAIKKATTSKTALMLKNSATKPPNKGPSKLPLIEAVERVPKA

SEQ ID NO: 1333 - protein, 53 aa, Escherichia coli
LFRADHHALQEFLNLAKPLQFQNILEQLYLLNLSRPQSEPKPCKNLQSLLYYE

SEQ ID NO: 1334 - protein, 41 aa, Escherichia coli
ESIKPLTYKAPGKPIKSQPLISEAPALSADITGPIVRPPRK

SEQ ID NO: 1335 - protein, 46 aa, Escherichia coli
NKLIFAIPKRIKNSPTKETVKGKETLASKMSIKKIENKGAFLAKEW

SEQ ID NO: 1336 - protein, 75 aa, Escherichia coli
ISYLQDLIPQIFCKKLPNHKRGKNNKSKLKSGKSIIHQAPIKTAFEDSLKRVPKVGISNPKPSPKKLKVASVAIA

SEQ ID NO: 1337 - DNA, 1197 bp, Escherichia coli
atgaattatcgctatcgcgccatgacccaggatggtcaaaaattgcaagggatcattgatgctaacgatgaacgtcaggcacgactgcggctgcgtgaagaagggcttttcctgctggatattcgcccccaaaaaagttcgggagtaaaaacacgtcgcccgaggatcagccatagtgaactgacgcttttcacccggcagttggcaaccttaagcgcagcggcattacccctggaagagagccttgccgtaatcggtcaacaaagcagtaataaacgactgggtgacgtgttaaatcaggtacgcagcgccatccttgaagggcatcccctttccgatgcattacagcattttcccacgcttttcgattcgctctatcgtaccctggtaaaagcgggcgaaaagagcgggctgctggccccggtgttggaaaagctggctgattacaatgaaaaccggcagaaaatccgcagcaagctcattcagtcactgatctacccctgtatgctcactacggtggcgattggggtcgtgattattctcctcactgctgtcgtgcccaaaattaccgaacagttcgtgcatatgaagcagcaactgccgctgagtacacgcattcttttaggtctgagcgacacgttgcaacgtaccggcccgacattattagcgacagtgtttattgtcgctgtaggtttctggctctggttaaaacgcggcaataaccgccaccgttttcatgccatgttgctgcgcgttgcgctcatcggcccgctgatttgcgccattaacagcgcacgctatctccgcactttaagtattttgcaatccagcggcgtccctctgctggatgggatgaatttgtccaccgaaagcctcaacaacctcgaaattcgccagcgtctggcaaatgcggcagagaacgttcgccagggtaacagcattcatctttcgctggaacaaaccgcaattttcccgccgatgatgctctacatggtggcctctggcgaaaaaagcgggcagctcggcacattaatggtcagagccgcagataaccaggagacactccaacaaaatcggatcgccttaacgctctccatcttcgagccagcactcattattacgatggcactgatcgtcctgtttattgtcgtgtcggtactccaacctcttcttcaacttaactcaatgattaattaa

SEQ ID NO: 1338 - DNA, 1779 bp, Escherichia coli; identical to SEQ ID NO: 171

SEQ ID NO: 1339 - DNA, 804 bp, Escherichia coli; identical to SEQ ID NO: 690

SEQ ID NO: 1340 - DNA, 150 bp, Escherichia coli
cgtaaggattattttaccgttgagcagttccagggcagcactcggggcttcgccctgtcgctcggctgcggcgagcactgctggctcgatcatatccgtaaccaaaagtacgccgcactgggtaaaatgcggcatatccagacatttcac

SEQ ID NO: 1341 - DNA, 2886 bp, Escherichia coli
atgccccgcagcacctggttcaaagcattattgttgtttgttgccctttgggcacccttaagtcaggcagaaacgggatggcagccgattcaggaaaccatccgtaaaagtgataaagataaccgccagtatcaggctatacgtctggataacggtatggtggtcttgctggtttctgatccgcaggcggttaaatcgctctcggcgctggtagtgcccgttgggtcgctggaagatcccgaggcgtaccaggggctggcacattaccttgaacatatgagtctgatggggtcgaaaaagtacccgcaggctgacagtctggccgaatatctcaaaatgcacggcggcagtcacaatgccagcacggcaccgtatcgcacggctttctatctggaagttgagaacgacgccttgcccggtgcggtagaccgcctggcggacgctattgcagaacccttgctcgacaagaaatacgccgaacgtgaacgtaatgcagtgaatgccgaattaaccatggcgcgtacgcgtgacgggatgcgcatggcacaggtcagcgcagaaaccattaacccggcacaccccggttcaaagttttctggtggtaacctcgaaactttaagcgacaaacccggaaatccggtgcagcaggcgctgaaagattttcacgagaaatattactctgccaatctgatgaaggcggttatttacagcaataaaccgctgccggagttggcaaaaatggcggcggacacctttggtcgcgtgccgaacaaagagagcaaaaaaccggaaatcaccgtgccggtagtcaccgacgcgcaaaagggcattatcattcattacgtcccggcgctgccgcgtaaagttctgcgcgttgagtttcgcatcgataacaattcagcgaagttccgtagtaaaacggatgaattgattacctatctgattggtaatcgcagcccaggtacactttctgactggctgcaaaagcagggattagttgagggcattagcgccaattccgatcctatcgtcaacggcaacagcggcgtattagcgatctctgcgtctttaaccgataaaggtctggcgaatcgcgatcaggttgtggcggccatttttagctacctcaatctgttacgcgaaaaagggattgataaacaatacttcgatgaactggcgaatgtgctggatatcgactttcgttatccgtcaatcacccgtgatatggattacgtcgaatggctggcagataccatgattcgcgttcctgttgagcatacgctggatgcagtcaatattgccgatcggtacgacgctaaagcagtaaaagaacgcctggcgatgatgacgccgcagaatgcgcgtatctggtatatcagcccgaaagagccgcacaacaaaacggcttactttgtcgatgcgccgtatcaggtcgataaaattagcgcacaaactttcgctgactggcagaaaaaagccgccgacattgcgctctctttgccagagcttaacccctatattcctgacgatttctcgctgattaagtcagagaagaaatatgaccatccagagcttattgttgatgagtcgaatctgcgtgtggtctatgcgccaagccgttattttgccagcgaacccaaagctgatgtcagcctgattttgcgtaacccgaaagccatggacagtgcccgtaatcaggtgatgtttgcgctcaatgattatctcgcagggctagcgcttgatcagttaagcaaccaggcgtcggttggtggcataagtttttccaccaacgctaacaacggccttatggttaatgccaatggttacacccagcgcctgccgcagctgttccaggctctgctggagggctactttagctataccgctacggaagatcagcttgagcaggcgaagtcctggtataaccagatgatggattctgcagaaaagggcaaagcgttcgagcaggcgattatgcccgcgcagatgctctcgcaagtgccgtacttctcgcgagatgaacggcgcaaaattttgccttcaatcactttgaaagaggtgctggcctatcgcgacgccttaaaatcaggggctcgaccagagtttatggttattggcaacatgaccgaagcccaggcaacaacgctggcacgcgatgtgcaaaaacagttgggcgctgatggttcggagtggtgtcgtaacaaagatgtcgtggtcgataaaaaacaatccgtcatctttgaaaaagccggtaacagcaccgactccgcactggcagcggtatttgtaccgactggctacgatgaatacaccagctcagcctatagctctctgttggggcagatcgtacagccgtggttctacaatcagttgcgtaccgaagaacagttgggctatgccgtgtttgcgtttccaatgagcgtggggcgtcagtggggcatgggcttcctgttgcaaagcaatgataaacagccttcattcttgtgggagcgttacaaggcgtttttcccaaccgcagaggcaaaattgcggacgatgaagccagaagagtttgcgcaaatccagcaggcggtaattacccagatgctgcaggcaccgcaaacgctcggcgaagaagcatcgaagttaagtaaagatttcgatcgcggcaatatgcgcttcgattcgcgtgataaaatcgtggcccagataaaactgctgacgccgcaaaaactggccgatttcttccatcaggcggtggtcgagccgcaaggcatggctattctgtcgcagatttccggtagccagaacgggaaagccgaatatgtgcatcctgaaggctggaaagtgtgggagaacgtcagcgcgttgcagcaaacaatgcccctgatgagtgaaaagaatgag

SEQ ID NO: 1342 - DNA, 2217 bp, Escherichia coli
atgagctctatctccctgatccaaccggatcgcgacctgttctcctggccgcagtactgggccgcctgttttggaccggcaccgtttttgccgatgtctcgtgaagagatggatcaacttggctgggatagctgcgacatcattttggttactggcgacgcgtatgtcgatcacccaagcttcgggatggcgatttgcggtcgtatgctggaagcgcagggctttcgcgtcgggatcatcgcccagccggactggagcagcaaagacgactttatgcgtctgggtaaaccgaatctgttttttggtgttactgctggcaacatggattcgatgatcaaccgctataccgccgatcgccgtttacgtcatgacgatgcctacacgccggataacgtcgcgggtaagcgaccggatcgcgccacactggtttatacccagcgttgtaaagaggcgtggaaagatgtgccggtgatcctaggcggtattgaggctagtctgcgccgtaccgcgcattatgattactggtccgataccgtgcgccgttccgtgctggtggattccaaagccgacatgctgatgttcggtaacggtgagcgtccgttggtggaggtggcgcaccgtctggcgatgggcgagccgattagtgaaatccgcgatgtgcgtaatactgcgattatcgtaaaagaggcgttgccaggctggtgcggcgtggattccacccgtctcgataccccagggaaaatcgacccgatcccgcatccgtatggtgaagatttgccgtgcgcggataacaaaccggtggcaccgaaaaagcaggaagccaaagccgtaaccgtgcagccgccgcgcccgaaaccgtgggaaaaaacctacgtattgctgccttctttcgagaaagtgaagggcgataaagtgctgtacgcccatgcttcgcgtattctgcaccacgaaactaacccaggctgcgcccgcgcattgatgcaaaaacatggcgaccgctatgtgtggatcaacccgcctgctattccgctctctaccgaagagatggacagcgtttttgcgctgccatacaagcgcgtgccgcatccggcctatggcaatgctcgtattccggcttacgaaatgatccgtttttcggtcaacattatgcgtggctgctttggtggctgttctttctgttctattaccgagcatgaagggcgcattattcagagccgttcggaagattcgatcattaatgagatcgaagcaatccgcgacaccgttccaggttttacgggcgtaatttccgatctcggtgggccaactgccaacatgtatatgttgcgctgcaaatcgccacgcgctgagcaaacctgccgtcgtttgtcgtgcgtttatccggatatttgtccgcacatggacactaaccacgaaccgacgatcaacctctatcgccgtgcgcgtgatctgaaaggcattaaaaaaatcctcatcgcctcaggcgtgcgttatgacatcgccgtggaagatccgcgctatatcaaagagctggcgacccatcacgtcggcggttatctgaagattgccccggaacataccgaagaagggccgttgtcgaagatgatgaagccgggcatgggcagctatgaccgctttaaagagctgttcgatacctactcgaaacaggcaggtaaagagcagtatttgatcccgtatttcatctccgcgcaccccggtacgcgcgatgaagatatggtgaatctggcgctgtggctgaaaaagcaccgcttccgcctcgaccaggtacagaacttctacccgtcgccgctggctaactcgaccactatgtattacaccggcaaaaacccgctggcgaagattggttataagagtgaagacgtctttgtaccgaagggcgacaagcagcgtcgcctgcataaagcgttgttgcgttaccacgatccggcaaactggccgttaatccgccaggcgctggaagcgatgggcaaaaagcatctgattggcagccgtcgcgattgcttagtgcctgcgccaaccattgaagagatgcgtgaggctcgtcgccagaaccgcaatacccgtccggcgttgactaaacatacgccgatggcgacccagcgtcagacgcctgctacggcaaaaaaagcgtcgtctacgcaatctcgtccggtgaatgctggtgcgaagaaacgccctaaagcggcggttggacgt

SEQ ID NO: 1343 - DNA, 1125 bp, Escherichia coli
atgcaaagcgttaccccaacatcgcaatacctgaaggcgctcaatgaaggcagccatcaacccgacgacgttcaaaaagaggccgtcagccgcctggaaattatttatcaggaactcatcaatagcacgcctccagcccccaggacgagtgggctaatggcgcgggtcggtaagctgtggggtaaacgcgaagacacaaagcatacgccagtgcgtggcttatatatgtggggcggtgtaggacgcgggaaaacctggctgatggaccttttctatcaaagcctgccgggagagcggaaacagcgcctgcactttcaccgttttatgctgcgggtgcatgaagagctaactgccttacaggggaagaccgatccgctggaaattattgccgatcgctttaaagcagaaactgacgtgctctgttttgacgaattttttgtttctgatattaccgacgccatgctacttggcggtctgatgaaagccctgttcacccgcggaataacgctggtagcgacgtcaaatattccgccggacgaactttatcgaaatggcttgcaacgtgcgcgttttctgcctgcaatcgatgccattaaacagcattgtgatgtaatgaacgtggacgctggtgttgattatcgactgcgtacactcactcaggcgcatctgtggctttcgccactcaacgatgaaattcgggcgcaaatggataaactatggttggctctggcgggggcgaaacgagaaaattcaccgacgttagaaatcaaccatcggccattggcgacaatgggcgtcgagaaccagacgctggcggtctcttttactacgctgtgcgtcgacgcccgcagtcagcatgactatattgcgctctcacgcctctttcacacagtcatgttgtttgatgtaccagttatgacgcggttgatggagagcgaagcgcgacgttttattgcgctggtggatgagttttacgagcgccatgtcaaattagtggtgagtgcagaagtgccgctgtatgaaatttatcagggtgagcggctgaagtttgagttccagcgttgcctgtcacgtctgcaagagatgcaaagcgaagagtatctgaagcgcgagcatttagcgggt

SEQ ID NO: 1344 - DNA, 1605 bp, Escherichia coli; identical to SEQ ID NO: 177

SEQ ID NO: 1345 - DNA, 1065 bp, Escherichia coli
atgagaaagattctgataacaggtggtgccgggtttattggctcggcgctggtgcgttatatcatcaacgaaacgagcgatgcggtggtagtggtcgataagctgacctacgccggaaacctgatgtcgctggcaccggtcgcgcaaagcgagcgctttgcctttgagaaagttgatatctgcgatcgggcagaactggcgcgcgtattcactgagcatcagccagactgtgtcatgcatctggcagccgaaagccatgttgaccgttctattgacggcccggcagcgtttattgaaaccaacattgtcgggacttatacattgcttgaagcggcgcgggcttactggaatgcgctgacggaagataaaaaatcagcgttccgttttcatcatatctctaccgacgaagtatatggtgacctgcactcgacggatgatttcttcaccgaaaccacgccgtatgcgccgagcagcccttattccgcttcaaaagccagcagcgaccatctggtacgcgcctggctgcggacctatggtctgccgacgcttatcaccaattgctcgaataactacggcccttaccactttccggaaaaactgatcccgctgatgatcctcaacgcgctggcgggtaaactgctgccggtatatggcaacgggcagcaaatccgtgactggctgtatgttgaagatcacgcccgcgcgctgtattgcgtggcgaccaccgggaaagtcggtgaaacctataatattggtggtcacaacgagcgtaagaatctcgatgttgtggaaaccatttgcgagttgctggaagaacttgccccgaacaagccgcacggcgtggcgcactatcgtgacctgatcacctttgtcgctgaccgtccggggcatgatctgcgttatgccattgatgcttcgaaaattgcccgtgaacttggctggctgccgcaggaaacctttgaaagtggaatgcgtaaaacggtgcagtggtatctggctaatgaaagctggtggaagcaggtgcaggacggcagctatcagggcgagcgtttaggtctgaaaggc

SEQ ID NO: 1346 - DNA, 4194 bp, Escherichia coli
atgagcggaaaaccagcggcgcgtcagggagatatgactcagtatggcggtcccattgtccagggttcggcaggtgtaagaattggcgcgccaactggcgtggcgtgctcggtgtgcccgggcgggatgacttcgggcaacccggtaaatccgctgctgggggcgaaggtgctgcccggcgagacggaccttgcgctgcccggcccgctgccgttcattctctcccgcacctacagcagctaccggacccggacgcctgcgccggtggggatttttggccccggctggaaagcgccttctgatatccgcttacagctacgcgatgatgcactggtactcaatgacaacggcgggcggagcattcactttgagccgctgctgccgggggaggcggtgtacagccgcagcgagtcaatgtggctggtgcgcggtggtaaggcagcgcagccggacggccacacgctggcgcggctgtggggggcgctgccgccggatatccggttaagcccgcatctttacctggcgaccaacagcgcacaggggccgtggtggatactggggtggtcagagcgggtgccgggtgctgaggacgtactgccagcgccgctgccgccgtaccgggtgcttaccgggatggcggaccgcttcgggcggacgctgacgtacaggcgtgaggccgccggtgacctggccggggaaatcaccggcgtgacggacggtgccgggcgggagttccgtctggtgctgaccacgcaggcgcagcgggcggaagaggcccgtaaacagcacaccgcttctttatcttcccctgacaccccccgccctctttcagactcagcgttccccgacacactgcccggtaccgaatacggtcccgacagaggtatccgcctttcggcggtgtggctgacgcacgacccggcatacccggagagcctgcccgctgcgccactggtgcggtacacgtatacggaagccggtgaactgctggcggtatatgaccgcagcaatacgcaggtgcgcgctttcacgtatgacgcgcagcacccgggccggatggtggggcaccgttatgcgggaaggccggagatgcgctaccgctacgacgatgcggggcgggtggtggagcaactgaacccggcaggcctgagttaccactaccagtatgagcaggaccgcatcaccgtcacggacagcctgaaccggcgtgaggtgctgcatacagaaggcggggccgggctgaagcgggtggtgaaaaaagaactggcggacggcagcgtcacgcacagcgggtatgacgcggcaggaaggctaacggcgcagacggacgcggcgggacggcggacagagtatggtctgaatgtggtatccggcgatatcacggacatcaccacaccggacgggcgggagacgaaattttactataacgacgggaaccagctgacggcggtggtgtccccggacgggctggagagccgccgggcatatgatgaaccgggcaggctggtatcggagacatcgcgcagcggggagacagtacgctaccgctacgatgatgcgtacagtgagttaccggcgacgacaacagatgcgacgggcagcacccggcagatgacctggagccgctacggtcagttgctggcgttcaccgactgctcgggctaccagacccgctatgaatacgaccgcttcggccagatgacggcggtccaccgcgaggaaggcatcagcctttaccgccgctatgacaaccgtggccggttaatctcggtgaaagacgcacagggccatgaaacgcggtatgagtacaacgccgcaggcgacctgactgccgttatcaccccggacggcaaccggagcgagacacagtacgatgcgtggggaaaggcggtcagcaccacgcagggcgggctgacgcgcagtatggaatacgaccttgccggacgcatcaccacgctgaccaacgagaacggcagccggagtgagtttacctacgatgcgcttgaccggctggtacagcagcgcggctttgacgggcggacgcaacgttaccactatgacctgaccggaaaactcacgcagagtgaagatgaggggcttgtcaccctctggcactacgacgaatcggaccgcctcactcaccgcacggtgaacggcgaaccggcagagcagtggcagtacgacgagcacggctggctgacagaaatcagccacctgagcgaaggccatcaggtggcggtgcattacggttatgatgataagggccgcctggccggggagcgccagacggtgcataacccggagacgggggaactgctgtggcagcatgagacagagcacgcatacaacgaacagggtctggcaaaccgcgtcacgccggacagcctgccgcgggtggagtggctgacctacggcagcggttatcttgcggggatgaagctgggcgggacgccgctggtggagttcacgcgcgacaggctgcaccgcgagacggtgcgcagcttcggcaataacgcatacgaactgaccagcacatacactcccgcaggccatttacagagccagcgcctgaacagccaggtgtatgaccgtgactacgactggaatgacaatggcgacctggtgcgcatcagcggcccgcgacagacgtgggaatatggctacagtgccacgggcaggctggagagcgtgcgcacccttgcatcagacctggatatccgcatcccgtatgcgaccgacccggcgggaaaccggctaccggacccggagctacacccggacagcacgctcacggcgtggccggataaccgcatcgcggaggatgcgcactatgtctaccgacacgatgaatacggcaggctgacggagaagacggaccgcatcccggcgggtgtgatacggacggacgacgagcggacccaccactaccactacgacagccagcaccgcctggtgttctacacgcggatacagcatggcgagccactggtcgagagccgctacctctacgacccgctgggccgccggacggggaaacgggtgtggcgtcgcgggcgtgacctgacgggatggatgtcgctgtcgcggaaaccggaggtgacgtggtacgggtgggacggcgaccggctgacgacggtacagaccgacaccacgcgtatccagacggtatacgagccgggaagcttcgcgccgctcatccgcatcgaaacagacaacggtgagcgggagaaagcgcagcgccgcagcctggcggagaagctgcagcaggaagggagcgaggacgggcacggtgtggtatttccggctgaactggtgcggctgctggacagactggaggaagaaatccgggcagaccgcgtgagcagtgaaagccgggcgtggcttgcgcagtgcgggctgacggtggagcaactggccagacaggtggagccggaatacacaccggcgagaaaagttcatctttaccactgcgaccaccggggcctgccgctggcgctcatcagcgaagacggcaatacggcgtggagcggggagtatgatgaatggggcaaccagctgaatgaggagaacccgcatcacctgcaccagccgtaccggctgccggggcagcagtatgataaggagtcggggctgtactacaaccggaaccggtactacgatccgttgcaggggcggtatatcactcaggacccgatagggctggaggggggatggagtctgtatgcgtatccgctgaatccggtgaatggtattgatccattagggttaagtcccgcagatgtagcgctaataagaagaaaagatcaactaaaccatcaaagagcatgggatatattatctgatacttatgaagatatgaagagattaaatttaggtgggactgatcaatttttccattgtatggcattttgtcgagtgtctaaattaaatgacgctggtgttagccgatcggcgaaagggctgggttatgaaaaagagattagagattacgggttaaatctgttcggtatgtacggcagaaaagtaaagctatcccattctgaaatgattgaagataataaaaaagacttggctgtaaatgaccatgggttgacatgtccatcaacaacagattgctcagatagatgtagtgattatattaatccagagcataaagaaacgataaaggctttacaagatgctggctatctcaag

SEQ ID NO: 1347 - DNA, 2193 bp, Escherichia coli
atggggcagggttttacaccttgtccagtattcttacttccccgaaacgggtttgcgcttatgaaatcaatgaatattgccgccagtagtgaactggtatcccgactttctactcatcgccgcgtggtggcgttgggagatactgattttacggacgtcgcggcagtcgtcattaccgctgcggatagtcgcagtggcattcttacgttgcttaagcgcaccggttttcatctaccggtgtttttgtattccgaacatgctgttgaattacctgcgggcgttacggcggtaatcaacggcaacgagcagcagtggctggagctggaatccgcagcctgtcagtatgaagagaatttgctgccaccgttttatgacacgctgacgcagtacgttgagatgggcaacagcacctttgcttgccctggacatcaacatggtgcgttctttaaaaagcatcctgccggacgccatttttacgatttctttggtgagaacatctttcgcgccgatatgtgtaacgctgacgtaaaattgggcgatctgcttattcatgaaggatcggcgaaagatgcgcagaaattcgcagccaaagtctttcatgccgataaaacctattttgtgctgaacggcacatcggcagcgaataaagtggtgacgaatgcgctgttaacgcgtggcgatctggtgctctttgaccgtaacaaccataagtcgaatcatcacggcgcgttgattcaggcgggggcgacgccggtctatctggaagcttcacgtaacccgtttggtttcattggcggtattgatgcgcactgttttaatgaagagtatctgcgccagcaaattcgcgacgttgcgccagaaaaagccgacctgccgcgcccgtttcgcctggcgattattcagctgggaacctatgacggcactgtctataacgcccgtcaggtgatcgataccgttgggcatctgtgtgattacattctgtttgattccgcgtgggtcggttatgaacaatttatcccgatgatggcggatagctcgccgctgctgttagaacttaacgaaaacgatccggggatctttgtgactcagtcggtgcacaaacagcaggcgggattctcacagacgtcgcagatccataaaaaagataaccatatccgcggacaggcgcgtttttgcccgcataagcggttgaataacgcctttatgctccatgcttctaccagccctttctatccgctgtttgctgcactggatgttaacgccaaaattcatgaaggggagagtgggcgtcggctgtgggctgagtgcgttgagttgggtattgagtcgcgcaaggctattcttgcgcgctgtaagctgttccgcccgtttatcccgcccgttgttgatggcaaattgtggcaggattatccgacatcagtgttagccagcgaccgtcgttttttcagttttgagccgggggcgaagtggcacggctttgaaggatatgccgcggatcagtattttgttgatccgtgcaagctgttactcactacaccaggtatcgatgccgaaaccggcgaatatagcgactttggcgttccggcgacgattctggcgcactatctgcgtgagaacggcattgtgccggagaagtgcgatctcaattccattctgttcttattaactccggcggaaagccacgagaagctggcacaactggtggcgatgctggctcaatttgaacagcatattgaggatgactcgccgctggctgaggtgttgccgagcgtttataacaaatatccggtgcgctatcgcgactacaccctgcgccagttgtgtcaggagatgcacgatctgtatgtcagtttcgacgtcaaagacctacaaaaagcgatgttccgccagcagagtttcccgtcagtggtgatgaacccccaggatgcgcatagcgcttatattcgcggtgacgtggagttggtgcggattcgtgatgccgaagggcgaattgcggcagaaggggcgttgccttatccacctggcgtgctttgcgtggtacccggggaagtctggggtggggcggttcaacgttatttccttgcactggaagaaggggtgaatttgttgccgggattttcgccggagctgcaaggtgtttatagcgaaaccgatgcggatggcatgaaacggttgtacggttatgtgttgaag

SEQ ID NO: 1348 - DNA, 279 bp, Escherichia coli
ataacaacaaaagcgcacggatataccgtattgccatcagtgctattgatagcccgggcagcagtgaattgcgcacccgaccggtggatggtgaactgcttttcgccccccgccagctggcgttgcaggctggtgagagcgagtattttaaattttactatcatggtccacgggataaccgcgagcgctactaccgggtctcatttcgcgaggtccccactcgtaaccatacaagacgcagcccaaccggcggcgtggtcagcacggagccggtggtgg

SEQ ID NO: 1349 - DNA, 99 bp, Escherichia coli
cgcggctgctgcgcgccttccggggcggatcatgacgagttcgcagcccgccggatggacggcggccgagttggcgcaggcggcggcgcgcggacagct

SEQ ID NO: 1350 - DNA, 90 bp, Escherichia coli
agagttaagcgagcggcgaccaggccgcgtgccgcagactatgcaactctgggtaggctgcctgctggtgattctgatctcaatgacttt

SEQ ID NO: 1351 - DNA, 243 bp, Escherichia coli; identical to SEQ ID NO: 174

SEQ ID NO: 1352 - DNA, 78 bp, Escherichia coli
agccttcggtcagcagtggggtatccggcatgttgtcgagagcaaattccagcattgccagcgaatcaaacgtctctt

SEQ ID NO: 1353 - DNA, 207 bp, Escherichia coli
cacgggtttcacggatacgctgcaaaacgccttctgagtgaccgtgggaggagtcgatcagcagaacgtcaacgccagcggcaaccagcgcgtcaacacgctcttcgttacccgcacctgcgccaactgcagcaccaacacgcagacggccttgctcgtctttacaggcgttcggtttacgttccgctttctggaaatctttcacgg

SEQ ID NO: 1354 - DNA, 255 bp, Escherichia coli
tcagttcagcgtcgatatccggaccttgcagaccgaaaacttcgcagcccaactgatggaactgacgataacgccctttctgcggacgctcgtgacggaacatcggcccgatataccacagacgctgttcctgattgtacagaagaccatgctcgatgccggcgcgtacacagcccgccgtcccttcagggcgcagagtcaggctgtcgccattgcgatcctcaaaggtgtacatctctttttcaaccacgtcgg

SEQ ID NO: 1355 - DNA, 135 bp, Escherichia coli
ttgtcggataagtattatctatgccaatcacaatttctcgtgaacgacgccctgagttatggatttcattatcaatcgcagaaagtcgttgataaaccgggaacagtttttgatacagttcctgaccggctttat

SEQ ID NO: 1356 - DNA, 504 bp, Escherichia coli
tttacccagttcatgggactgctgaatacccagcggcgagaagataccgtggttaatggcgttgttgaggaacaggattttcgccggttcaacaaagatagacgccagcggcagcatgtcatggacaaccatgaagttaacgcccgcagccagcattttggacagggtttcaacaatcgggccaatgccgaggaatgccagaatagcgaggatcatcccgatgatgcctgcggagaagttattcaccagcatctcaaaaccggatttgatcttaccgtctacccagcggtcgaagtgcttaatgcaccagccgcccagcggacctgcaatcatagaaccgaggaacatcggcatgtctgcgccgacgataacgcccatggtggtgatggcaccgactacgccgccacgttcgccgcctaccagcttaccaccggtataaccgatcagcagcggcaggagataagtgatcatcggcccgaccagcttcgccagcgtctcgttcgg

SEQ ID NO: 1357 - DNA, 246 bp, Escherichia coli
ccagccaaagaaaaccagtacggaaatatcacccagaccgatataaccataaggacgattgcccacggtgtaggtgatagcggcaatgatcgacaacccgccaagaatcaggaaaccgacaaaatcggccagcgtatggcacgccactgcaaccagtgccagcccggagagacagatgagcacgacggtaataatgagcgcccgtttcatctcttgctgggtaatgacccctttttgcatgccgcg

SEQ ID NO: 1358 - DNA, 177 bp, Escherichia coli
ccatttcacactcagtcatcagcagttcgccgacgttcaccgcaaatcccagctcttcgggcacaatcgacacgtcgatgtaaccactgcggatttcacccgcgaacgggtgattgcgcccgtaaccgcgttgggtggagtaggccagcgccagcaaatagccttcgtcgccgcgca

SEQ ID NO: 1359 - DNA, 120 bp, Escherichia coli
ataaacgcgcccacagagcttctttggcatcggcgcgccggtcccacgctcgcgcaagacgaaacagcaacgccgtttgcccttcaagctgaagtgccatgcgacttaagacatgacgca

SEQ ID NO: 1360 - DNA, 1549 bp, Escherichia coli
gtggtgcgaagagatcttcacgccgccttccgggattggaacgtacggtgtttctttgtcagtacgtttgtcgctgttacgtaccgcaagccaggttttgaaaccgtagaagatgatgctgtacaccacaatcaggaacagaatactcaggcctgcgttggtgtagttgttcacaacgatgtggttcatgttggcaatctgctgcgccgtaaggtcagtaccgttagcaatcttctctttgtactggcttgccatgtagaagaagccttccatctgcgggttggtgctgaacagtttcagacccagcgcccaggtggtgcagataagcagccatacagccggaacaacagttacccagatgtattgggtgcgcttcatcttaatcagcacaacggtgcccagtaccagcgctacggctgccagcatctggttggagataccgaacagcggccacaggctcttaacgccgcccagcggatcgaccacgccctgatacagcaggtagccccacagacccacacagcccgcagtaccgatgataccagcaaccagagagtcggtttttttcaggaacgggatgaagttacccagcaggtcttgcagcataaagcggccagaacgggtacccgcatccagcgcggtcaggatgaacagggcttcgaacagaataccgaagtgataccagaagcccatgtcagccatcggcagcactttgtggaacacatgagcgatacctaccgccagcgtcggcgcaccacctgcacggttcaggacagaaggctcaccaatgtctttcgcggtttgcaggatctgctctggcgaaatcacgaagccccaagagctgacggtcgctgccgcgtgtgcggtaacgtctttcagctgcgccatgatgatcggcgcgttctcgccacccatttcatgcaggttaggcatggtgatgccaaggcccgcgggcggggtgttcatcgcgaagtaaagacccggttcgatgatggatgcagcaaccagcgccataatcgccacgaaggactccatcagcattgcgccgtagccgatgaaacgcgcgtcggtttcgttagccagcagtttcggcgtcgtaccggaagagatcagcgcgtggaagccagataccgcaccacaggcgatggtgatgaacaggaacgggaacagagcgcctttccacagcgggccagtaccgtcaatgtactgggtcatcgcaggcattttcagttccgggttcagcaccacgatacccagcgccaggccgacgataacgccgatcttcaggaaggttgccagatagtcgcgtggtgcgaggatcagccacaccggcagcagcgcggaaacaaacgcatagccaatcagcgcgaaggtaatggtggtgtctttaaaggtcagtgccggaccccagtacggatcgtgagcaatcacgccaccgaagtagatagaggcaaccagcagcacgataccaataacagagacttcacccacacgccccggacggataaagcgcatgtagatacccataaacagcgcaattggtacggtt

SEQ ID NO: 1361 - DNA, 270 bp, Escherichia coli; identical to SEQ ID NO: 235

SEQ ID NO: 1362 - DNA, 282 bp, Escherichia coli; identical to SEQ ID NO: 236

SEQ ID NO: 1363 - DNA, 192 bp, Escherichia coli; identical to SEQ ID NO: 234

SEQ ID NO: 1364 - DNA, 90 bp, Escherichia coli; identical to SEQ ID NO: 1350

SEQ ID NO: 1365 - protein, 398 aa, Escherichia coli [sequence omitted]

SEQ ID NO: 1366 - protein, 593 aa, Escherichia coli; identical to SEQ ID NO: 471

SEQ ID NO: 1367 - protein, 268 aa, Escherichia coli; identical to SEQ ID NO: 852

SEQ ID NO: 1368 - skipped

SEQ ID NO: 1369 - protein, 50 aa, Escherichia coli
RKDYFTVEQFQGSTRGFALSLGCGEHCWLDHIRNQKYAALGKMRHIQTFH

SEQ ID NO: 1370 - protein, 962 aa, Escherichia coli
MPRSTWFKALLLFVALWAPLSQAETGWQPIQETIRKSDKDNRQYQAIRLDNGMVVLLVSDPQAVKSLSALVVPVGSLEDPEAYQGLAHYLEHMSLMGSKKYPQADSLAEYLKMHGGSHNASTAPYRTAFYLEVENDALPGAVDRLADAIAEPLLDKKYAERERNAVNAELTMARTRDGMRMAQVSAETINPAHPGSKFSGGNLETLSDKPGNPVQQALKDFHEKYYSANLMKAVIYSNKPLPELAKMAADTFGRVPNKESKKPEITVPVVTDAQKGIIIHYVPALPRKVLRVEFRIDNNSAKFRSKTDELITYLIGNRSPGTLSDWLQKQGLVEGISANSDPIVNGNSGVLAISASLTDKGLANRDQVVAAIFSYLNLLREKGIDKQYFDELANVLDIDFRYPSITRDMDYVEWLADTMIRVPVEHTLDAVNIADRYDAKAVKERLAMMTPQNARIWYISPKEPHNKTAYFVDAPYQVDKISAQTFADWQKKAADIALSLPELNPYIPDDFSLIKSEKKYDHPELIVDESNLRVVYAPSRYFASEPKADVSLILRNPKAMDSARNQVMFALNDYLAGLALDQLSNQASVGGISFSTNANNGLMVNANGYTQRLPQLFQALLEGYFSYTATEDQLEQAKSWYNQMMDSAEKGKAFEQAIMPAQMLSQVPYFSRDERRKILPSITLKEVLAYRDALKSGARPEFMVIGNMTEAQATTLARDVQKQLGADGSEWCRNKDVVVDKKQSVIFEKAGNSTDSALAAVFVPTGYDEYTSSAYSSLLGQIVQPWFYNQLRTEEQLGYAVFAFPMSVGRQWGMGFLLQSNDKQPSFLWERYKAFFPTAEAKLRTMKPEEFAQIQQAVITQMLQAPQTLGEEASKLSKDFDRGNMRFDSRDKIVAQIKLLTPQKLADFFHQAVVEPQGMAILSQISGSQNGKAEYVHPEGWKVWENVSALQQTMPLMSEKNE

SEQ ID NO: 1371 - protein, 739 aa, Escherichia coli
MSSISLIQPDRDLFSWPQYWAACFGPAPFLPMSREEMDQLGWDSCDIILVTGDAYVDHPSFGMAICGRMLEAQGFRVGIIAQPDWSSKDDFMRLGKPNLFFGVTAGNMDSMINRYTADRRLRHDDAYTPDNVAGKRPDRATLVYTQRCKEAWKDVPVILGGIEASLRRTAHYDYWSDTVRRSVLVDSKADMLMFGNGERPLVEVAHRLAMGEPISEIRDVRNTAIIVKEALPGWCGVDSTRLDTPGKIDPIPHPYGEDLPCADNKPVAPKKQEAKAVTVQPPRPKPWEKTYVLLPSFEKVKGDKVLYAHASRILHHETNPGCARALMQKHGDRYVWINPPAIPLSTEEMDSVFALPYKRVPHPAYGNARIPAYEMIRFSVNIMRGCFGGCSFCSITEHEGRIIQSRSEDSIINEIEAIRDTVPGFTGVISDLGGPTANMYMLRCKSPRAEQTCRRLSCVYPDICPHMDTNHEPTINLYRRARDLKGIKKILIASGVRYDIAVEDPRYIKELATHHVGGYLKIAPEHTEEGPLSKMMKPGMGSYDRFKELFDTYSKQAGKEQYLIPYFISAHPGTRDEDMVNLALWLKKHRFRLDQVQNFYPSPLANSTTMYYTGKNPLAKIGYKSEDVFVPKGDKQRRLHKALLRYHDPANWPLIRQALEAMGKKHLIGSRRDCLVPAPTIEEMREARRQNRNTRPALTKHTPMATQRQTPATAKKASSTQSRPVNAGAKKRPKAAVGR

SEQ ID NO: 1372 - protein, 375 aa, Escherichia coli
MQSVTPTSQYLKALNEGSHQPDDVQKEAVSRLEIIYQELINSTPPAPRTSGLMARVGKLWGKREDTKHTPVRGLYMWGGVGRGKTWLMDLFYQSLPGERKQRLHFHRFMLRVHEELTALQGKTDPLEIIADRFKAETDVLCFDEFFVSDITDAMLLGGLMKALFTRGITLVATSNIPPDELYRNGLQRARFLPAIDAIKQHCDVMNVDAGVDYRLRTLTQAHLWLSPLNDEIRAQMDKLWLALAGAKRENSPTLEINHRPLATMGVENQTLAVSFTTLCVDARSQHDYIALSRLFHTVMLFDVPVMTRLMESEARRFIALVDEFYERHVKLVVSAEVPLYEIYQGERLKFEFQRCLSRLQEMQSEEYLKREHLAG

SEQ ID NO: 1373 - protein, 535 aa, Escherichia coli; identical to SEQ ID NO: 477

SEQ ID NO: 1374 - protein, 355 aa, Escherichia coli
MRKILITGGAGFIGSALVRYIINETSDAVVVVDKLTYAGNLMSLAPVAQSERFAFEKVDICDRAELARVFTEHQPDCVMHLAAESHVDRSIDGPAAFIETNIVGTYTLLEAARAYWNALTEDKKSAFRFHHISTDEVYGDLHSTDDFFTETTPYAPSSPYSASKASSDHLVRAWLRTYGLPTLITNCSNNYGPYHFPEKLIPLMILNALAGKLLPVYGNGQQIRDWLYVEDHARALYCVATTGKVGETYNIGGHNERKNLDVVETICELLEELAPNKPHGVAHYRDLITFVADRPGHDLRYAIDASKIARELGWLPQETFESGMRKTVQWYLANESWWKQVQDGSYQGERLGLKG

SEQ ID NO: 1375 - protein, 1398 aa, Escherichia coli
MSGKPAARQGDMTQYGGPIVQGSAGVRIGAPTGVACSVCPGGMTSGNPVNPLLGAKVLPGETDLALPGPLPFILSRTYSSYRTRTPAPVGIFGPGWKAPSDIRLQLRDDALVLNDNGGRSIHFEPLLPGEAVYSRSESMWLVRGGKAAQPDGHTLARLWGALPPDIRLSPHLYLATNSAQGPWWILGWSERVPGAEDVLPAPLPPYRVLTGMADRFGRTLTYRREAAGDLAGEITGVTDGAGREFRLVLTTQAQRAEEARKQHTASLSSPDTPRPLSDSAFPDTLPGTEYGPDRGIRLSAVWLTHDPAYPESLPAAPLVRYTYTEAGELLAVYDRSNTQVRAFTYDAQHPGRMVGHRYAGRPEMRYRYDDAGRVVEQLNPAGLSYHYQYEQDRITVTDSLNRREVLHTEGGAGLKRVVKKELADGSVTHSGYDAAGRLTAQTDAAGRRTEYGLNVVSGDITDITTPDGRETKFYYNDGNQLTAVVSPDGLESRRAYDEPGRLVSETSRSGETVRYRYDDAYSELPATTTDATGSTRQMTWSRYGQLLAFTDCSGYQTRYEYDRFGQMTAVHREEGISLYRRYDNRGRLISVKDAQGHETRYEYNAAGDLTAVITPDGNRSETQYDAWGKAVSTTQGGLTRSMEYDLAGRITTLTNENGSRSEFTYDALDRLVQQRGFDGRTQRYHYDLTGKLTQSEDEGLVTLWHYDESDRLTHRTVNGEPAEQWQYDEHGWLTEISHLSEGHQVAVHYGYDDKGRLAGERQTVHNPETGELLWQHETEHAYNEQGLANRVTPDSLPRVEWLTYGSGYLAGMKLGGTPLVEFTRDRLHRETVRSFGNNAYELTSTYTPAGHLQSQRLNSQVYDRDYDWNDNGDLVRISGPRQTWEYGYSATGRLESVRTLASDLDIRIPYATDPAGNRLPDPELHPDSTLTAWPDNRIAEDAHYVYRHDEYGRLTEKTDRIPAGVIRTDDERTHHYHYDSQHRLVFYTRIQHGEPLVESRYLYDPLGRRTGKRVWRRGRDLTGWMSLSRKPEVTWYGWDGDRLTTVQTDTTRIQTVYEPGSFAPLIRIETDNGEREKAQRRSLAEKLQQEGSEDGHGVVFPAELVRLLDRLEEEIRADRVSSESRAWLAQCGLTVEQLARQVEPEYTPARKVHLYHCDHRGLPLALISEDGNTAWSGEYDEWGNQLNEENPHHLHQPYRLPGQQYDKESGLYYNRNRYYDPLQGRYITQDPIGLEGGWSLYAYPLNPVNGIDPLGLSPADVALIRRKDQLNHQRAWDILSDTYEDMKRLNLGGTDQFFHCMAFCRVSKLNDAGVSRSAKGLGYEKEIRDYGLNLFGMYGRKVKLSHSEMIEDNKKDLAVNDHGLTCPSTTDCSDRCSDYINPEHKETIKALQDAGYLK

SEQ ID NO: 1376 - protein, 731 aa, Escherichia coli
MGQGFTPCPVFLLPRNGFALMKSMNIAASSELVSRLSTHRRVVALGDTDFTDVAAVVITAADSRSGILTLLKRTGFHLPVFLYSEHAVELPAGVTAVINGNEQQWLELESAACQYEENLLPPFYDTLTQYVEMGNSTFACPGHQHGAFFKKHPAGRHFYDFFGENIFRADMCNADVKLGDLLIHEGSAKDAQKFAAKVFHADKTYFVLNGTSAANKVVTNALLTRGDLVLFDRNNHKSNHHGALIQAGATPVYLEASRNPFGFIGGIDAHCFNEEYLRQQIRDVAPEKADLPRPFRLAIIQLGTYDGTVYNARQVIDTVGHLCDYILFDSAWVGYEQFIPMMADSSPLLLELNENDPGIFVTQSVHKQQAGFSQTSQIHKKDNHIRGQARFCPHKRLNNAFMLHASTSPFYPLFAALDVNAKIHEGESGRRLWAECVELGIESRKAILARCKLFRPFIPPVVDGKLWQDYPTSVLASDRRFFSFEPGAKWHGFEGYAADQYFVDPCKLLLTTPGIDAETGEYSDFGVPATILAHYLRENGIVPEKCDLNSILFLLTPAESHEKLAQLVAMLAQFEQHIEDDSPLAEVLPSVYNKYPVRYRDYTLRQLCQEMHDLYVSFDVKDLQKAMFRQQSFPSVVMNPQDAHSAYIRGDVELVRIRDAEGRIAAEGALPYPPGVLCVVPGEVWGGAVQRYFLALEEGVNLLPGFSPELQGVYSETDADGMKRLYGYVLK

SEQ ID NO: 1377 - protein, 93 aa, Escherichia coli
ITTKAHGYTVLPSVLLIARAAVNCAPDRWMVNCFSPPASWRCRLVRASILNFTIMVHGITASATTGSHFARSPLVTIQDAAQPAAWSARSRWW

SEQ ID NO: 1378 - protein, 33 aa, Escherichia coli
RGCCAPSGADHDEFAARRMDGGRVGAGGGARTA

SEQ ID NO: 1379 - protein, 30 aa, Escherichia coli
RVKRAATRPRAADYATLGRLPAGDSDLNDF

SEQ ID NO: 1380 - protein, 81 aa, Escherichia coli; identical to SEQ ID NO: 474

SEQ ID NO: 1381 - protein, 26 aa, Escherichia coli
SLRSAVGYPACCREQIPALPANQTSL

SEQ ID NO: 1382 - protein, 69 aa, Escherichia coli
HGFHGYAAKRLLSDRGRSRSAERQRQRQPARQHALRYPHLRQLQHQHADGLARLYRRSVYVPLSGNLSR

SEQ ID NO: 1383 - protein, 85 aa, Escherichia coli
SVQRRYPDLADRKLRSPTDGTDDNALSADARDGTSARYTTDAVPDCTEDHARCRRVHSPPSLQGAESGCRHCDPQRCTSLFQPRR

SEQ ID NO: 1384 - protein, 45 aa, Escherichia coli
LSDKYYLCQSQFLVNDALSYGFHYQSQKVVDKPGTVFDTVPDRLY

SEQ ID NO: 1385 - protein, 168 aa, Escherichia coli
FTQFMGLLNTQRREDTVVNGVVEEQDFRRFNKDRRQRQHVMDNHEVNARSQHFGQGFNNRANAEECQNSEDHPDDACGEVIHQHLKTGFDLTVYPAVEVLNAPAAQRTCNHRTEEHRHVCADDNAHGGDGTDYAATFAAYQLTTGITDQQRQEISDHRPDQLRQRLVR

SEQ ID NO: 1386 - protein, 82 aa, Escherichia coli
PAKENQYGNITQTDITIRTIAHGVGDSGNDRQPAKNQETDKIGQRMARHCNQCQPGETDEHDGNNERPFHLLLGNDPFLHAA

SEQ ID NO: 1387 - protein, 59 aa, Escherichia coli
PFHTQSSAVRRRSPQIPALRAQSTRRCNHCGFHPRTGDCARNRVGWSRPAPANSLRRRA

SEQ ID NO: 1388 - protein, 40 aa, Escherichia coli
INAPTELLWHRRAGPTLAQDETATPFALQAEVPCDLRHDA

SEQ ID NO: 1389 - protein, 516 aa, Escherichia coli
VVRRDLHAAFRDWNVRCFFVSTFVAVTYRKPGFETVEDDAVHHNQEQNTQACVGVVVHNDVVHVGNLLRRKVSTVSNLLFVLACHVEEAFHLRVGAEQFQTQRPGGADKQPYSRNNSYPDVLGALHLNQHNGAQYQRYGCQHLVGDTEQRPQALNAAQRIDHALIQQVAPQTHTARSTDDTSNQRVGFFQERDEVTQQVLQHKAARTGTRIQRGQDEQGFEQNTEVIPEAHVSHRQHFVEHMSDTYRQRRRTTCTVQDRRLTNVFRGLQDLLWRNHEAPRADGRCRVCGNVFQLRHDDRRVLATHFMQVRHGDAKARGRGVHREVKTRFDDGCSNQRHNRHEGLHQHCAVADETRVGFVSQQFRRRTGRDQRVEARYRTTGDGDEQEREQSAFPQRASTVNVLGHRRHFQFRVQHHDTQRQADDNADLQEGCQIVAWCEDQPHRQQRGNKRIANQREGNGGVFKGQCRTPVRIVSNHATEVDRGNQQHDTNNRDFTHTPRTDKAHVDTHKQRNWYG

SEQ ID NO: 1390 - protein, 90 aa, Escherichia coli; identical to SEQ ID NO: 535

SEQ ID NO: 1391 - protein, 94 aa, Escherichia coli; identical to SEQ ID NO: 536

SEQ ID NO: 1392 - protein, 64 aa, Escherichia coli; identical to SEQ ID NO: 534

SEQ ID NO: 1393 - protein, 30 aa, Escherichia coli; identical to SEQ ID NO: 1379

1.-37. (canceled)

38. A hyperimmune serum-reactive antigen comprising an amino acid sequence encoded by a nucleic acid molecule of claim 38 or a fragment thereof and further defined as having an amino acid sequence of SEQ ID NO: 302-336, 338-600, 763-924, 997-1068, 1203-1336, or 1365-1393.

39. The hyperimmune serum-reactive antigen fragment of claim 38, further defined as a peptide comprising an amino acid sequence of column “predicted immunogenic aa” and/or “location of identified immunogenic region” of any of Table 1 to 4 and/or Table 8, “aa (start-stop)” of Table 6, and/or a serum reactive epitope of Table 7.

40. The hyperimmune serum-reactive antigen fragment of claim 39, further defined as comprising an amino acid sequence of amino acids: 12-19, 24-29, 37-43, 47-53, 65-72, 83-95, 112-122, 136-147, 162-168, 174-181, 189-195, 201-208, 216-221, 234-243, 270-276, 278-288, 305-316, 318-342, 350-356, 368-400, 420-428, 434-443, 471-477, 481-488, 530-535, 540-547, 566-575, 591-601, 603-609, 624-629, and/or 192-333 of SEQ ID NO: 301; 9-22, 38-46, 51-61, 66-73, 108-126, 136-154, 162-169, 177-186, 198-204, 231-254, 256-272, 277-295, 297-311, 314-328, 331-338, 379-385, 393-402, and/or 69-88 of SEQ ID NO: 302; 18-36, 43-53, 80-86, 94-110, 112-118, 152-168, 170-182, 188-198, 200-220, 225-230, 237-243, 248-259, 265-289, 298-317, 325-331, 338-344, 349-360, 382-389, 400-407, 413-419, 433-453, 494-501, 503-524, 530-536, 557-565, 574-582, 586-592, 603-629, 631-637, 643-657, 673-680, 699-705, 715-720, 737-754, 764-771, 778-793, 800-844, 853-858, 874-893, 899-905, 915-929, 957-965, 134-148, 525-552, and/or 821-920 of SEQ ID NO: 303; 11-22, 28-34, 40-45, 65-86, 99-107, 115-125, 132-141, 143-150, 158-190, 203-211, 216-239, 246-257, 259-270, 272-279, 286-306, 313-332, 338-364, 369-380, 387-397, 410-418, 422-435, 449-455, 467-510, 515-521, 532-538, 547-563, 251-323, and/or 368-389 of SEQ ID NO: 304; 7-20, 28-45, 51-66, 81-104, 108-115, 124-137, 149-155, 161-206, 209-214, 222-239, 250-262, 276-282, 309-343, 351-363, 365-386, 405-413, 435-440, 446-454, 458-466, 470-477, 482-492, and/or 235-269 of SEQ ID NO: 305; 12-43, 51-60, 65-74, 76-86, 102-108, 110-118, 129-139, 146-160, 164-172, 180-192, 195-208, 212-220, 228-250, 252-267, 271-277, 281-288, 296-313, 344-353, 364-379, 381-387, 394-414, 435-443, 451-460, 468-474, 484-491, 500-510, 541-556, 560-586, 604-618, 635-641, 647-657, 668-705, 715-727, 729-734, 740-745, 760-780, 803-809, and/or 752-825 of SEQ ID NO: 306; 16-23, 66-90, 98-110, 125-131, 144-150, 194-200, 213-219, 221-232, 237-256, 263-281, 293-298, 311-318, 326-337, 339-354, 373-389, 396-402, 404-421, 427-439, 441-448, 452-462, 467-479, 508-530, 534-541, 544-550, 562-569, 575-581, 583-592, 595-628, 636-656, 658-672, 674-680, 687-697, 715-721, 731-736, 739-749, 754-761, 771-788, 790-797, 813-824, and/or 623-653 of SEQ ID NO: 307; 14-42, 51-57, 66-77, 84-96, 103-111, 129-148, 158-193, 198-208, 212-222, 242-262, and/or 31-133 of SEQ ID NO: 308; 4-23, 36-62, 65-84, 98-104, 128-135, 144-161, 175-204, 219-240, 250-264, 266-278, 280-290, and/or 119-152 of SEQ ID NO: 309; 13-26, 33-45, 50-60, 75-81, 97-105, 123-131, 138-145, 158-166, 168-177, and/or 66-170 of SEQ ID NO: 310; 20-26, 35-50, 52-67, 85-100, 106-149, 189-199, 202-208, 217-226, 236-244, 270-294, 310-332, 340-347, 350-356, 364-373, 375-380, 401-428, 438-445, 477-493, 513-548, 555-564, 568-596, 600-612, 650-665, 667-674, 680-687, 696-707, 715-722, 728-764, 779-784, 795-809, 813-820, 837-843, 858-864, 885-891, 894-900, 907-917, 922-935, 941-946, 970-977, 979-986, 1022-1032, and/or 881-924 of SEQ ID NO: 311; 13-21, 48-57, 72-83, 105-119, 125-133, 146-153, 170-177, 221-239, 245-274, 283-292, 299-305, 317-329, 335-343, 358-367, 374-380, 399-407, 430-438, 449-454, 473-479, 483-505, 517-527, 531-537, 554-560, 586-599, 601-616, 623-629, 639-647, 649-654, 658-667, 669-676, 690-709, 714-729, and/or 277-306 of SEQ ID NO: 312; 14-28, 34-40, 45-54, 69-83, 86-100, 116-123, 135-143, 146-161, 168-179, 187-200, 203-225, 237-250, 255-265, 271-292, 298-314, and/or 104-138 of SEQ ID NO: 313; 4-28, 36-42, 78-85, 106-122, 130-135, 144-150, 161-175, 180-190, 194-200, 226-234, 256-265, 274-294, 309-316, 324-333, 373-379, 382-389, 398-404, 407-416, 422-446, 451-462, 530-541, and/or 448-483 of SEQ ID NO: 314; 5-50, 53-64, 75-80, 110-116, 119-125, 131-148, 150-156, 192-217, 224-229, 260-267, 275-281, 283-300, 305-310, 323-343, 358-365, 400-406, 422-429, 447-464, 498-503, 512-518, 520-526, 530-537, 552-562, 614-623, 697-703, 705-711, 719-727, 729-743, 745-753, 788-796, 802-810, 813-834, and/or 377-400 of SEQ ID NO: 315; 4-26, 55-61, 64-70, 74-99, 107-119, 128-134, 137-154, 167-178, and/or 108-137 of SEQ ID NO: 316; 12-54, 70-76, 117-125, 135-143, 196-202, 205-213, 243-261, 263-269, 278-298, 312-318, 320-326, 334-346, 358-368, 377-389, 396-404, 414-423, 429-438, 448-455, 483-490, 540-549, 557-563, 592-599, 601-609, 622-628, 632-653, 656-692, 695-712, 714-730, 760-766, 775-786, 788-803, 807-814, 820-831, 848-854, 875-886, 892-899, 911-917, 919-925, 927-935, 954-974, 980-992, 1017-1026, 1032-1044, 1074-1079, 1082-1089, 1098-1108, 1115-1120, 1129-1137, 1139-1145, 1161-1170, 1189-1195, 1197-1212, 1219-1225, 1234-1250, 1267-1283, 1302-1318, 1321-1329, 1362-1368, 1377-1388, 1395-1408, and/or 894-924 of SEQ ID NO: 317; 58-76, 82-87, 95-103, 107-114, 122-136, 139-148, 150-162, 165-172, 184-190, 203-220, 228-238, 245-258, 260-267, 288-295, 299-328, 333-352, 357-386, 424-429, and/or 2-20 of SEQ ID NO: 318; 5-26, 59-66, 68-74, 81-87, 105-116, 122-132, 144-160, 185-212, 217-223, 228-234, 241-252, 269-274, 291-313, 318-326, 335-342, 352-358, 368-375, 397-404, 411-422, 431-439, 458-472, 474-485, 493-499, 509-519, 521-527, 530-558, 563-579, 590-601, and/or 554-596 of SEQ ID NO: 319; 6-12, 18-28, 39-45, 69-102, 120-128, 137-147, 164-170, 173-179, 223-230, 236-254, 265-277, 320-326, 350-368, 376-400, 404-416, 441-448, 462-477, and/or 178-285 of SEQ ID NO: 320; 4-19, 21-47, 52-57, 59-73, 79-86, 88-95, 100-108, 114-129, 136-143, 145-151, 176-182, 235-242, 248-258, 273-281, 301-308, 310-316, 329-340, 347-354, 363-380, 384-400, 407-415, 430-441, 469-480, 491-504, 507-526, 530-540, 547-554, 563-579, 609-617, 620-626, 630-636, 643-655, 665-680, 706-714, 718-725, 729-740, 747-754, 756-779, 790-803, 806-816, 818-824, 829-840, 842-853, 862-877, 901-912, 928-939, 941-952, 961-978, 988-999, 1026-1037, 1067-1078, 1080-1087, 1089-1098, 1104-1115, 1117-1124, 1128-1139, 1143-1151, 1155-1176, 1180-1186, 1205-1211, 1218-1224, 1228-1242, 1244-1251, 1258-1278, 1280-1287, 1290-1298, 1304-1326, 1331-1341, 1363-1378, 1392-1399, 1407-1415, 1430-1443, 1445-1454, 179-265, and/or 1343-1368 of SEQ ID NO: 321; 4-24, 31-37, 61-75, 83-89, 94-102, 117-123, 130-143, 184-191, 203-210, 212-228, 270-284, 286-292, 301-307, 312-319, 329-335, and/or 238-319 of SEQ ID NO: 322; 4-16, 22-35, 39-44, 50-59, 65-73, 86-104, 108-117, 128-137, 139-147, 153-159, 165-171, 185-192, 198-223, and/or 102-120 of SEQ ID NO: 323; 8-16, 23-30, 32-40, 45-50, 61-68, 81-89, 91-114, 121-129, 131-149, 161-185, 191-200, 217-224, 229-249, 253-262, 266-273, 282-289, 297-303, and/or 265-282 of SEQ ID NO: 324; 10-48, 64-71, 81-88, 100-112, 130-140, 153-170, 177-184, 197-202, 236-250, 266-272, 284-292, 294-300, 306-318, 320-326, 346-357, 379-387, 389-396, 405-416, 424-435, 447-453, 474-483, 501-510, 529-536, 550-568, 582-594, 606-611, 625-631, 633-645, 664-672, 685-692, 703-711, 730-745, 761-775, 782-790, 792-804, 816-825, 827-834, 840-866, and/or 178-193 of SEQ ID NO: 325; 11-25, 39-57, 69-94, 100-107, 118-155, 158-171, 189-201, 226-233, 236-245, 249-263, 268-277, 287-312, 315-329, 333-342, 351-357, 364-374, 382-388, 399-407, 419-449, 454-471, 486-492, 494-504, 515-541, 547-552, 578-600, 611-623, 625-641, 651-657, 678-692, 699-709, 713-720, 746-752, 772-781, 791-801, 829-844, 880-893, 900-910, 915-923, 936-942, 953-970, 88-167, and/or 804-839 of SEQ ID NO: 326; 6-16, 19-40, 55-61, 67-92, 103-108, 125-142, 154-162, 190-196, 236-247, 257-272, 280-290, 310-320, 331-343, 367-375, and/or 281-297 of SEQ ID NO: 327; 42-48, 63-116, 151-172, 181-187, 189-196, 200-205, 217-232, 256-261, 288-319, 326-352, 360-374, 380-404, 412-435, 453-466, 474-485, 500-507, 514-519, 525-530, 558-564, 568-582, 590-595, 600-610, 633-640, 666-671, 694-702, 715-722, 730-737, 757-768, 774-785, 820-827, 832-848, 873-878, 883-890, 906-915, 918-930, 937-944, 948-956, 960-966, 970-978, 1023-1040, 1049-1056, 1065-1071, 1085-1090, 1105-1117, 1122-1132, 1165-1171, 1186-1195, 1210-1216, 1309-1342, 1345-1352, 1354-1360, 1375-1385, 1400-1407, 1414-1421, 1430-1439, 1446-1467, 1479-1485, 1522-1530, 1565-1572, 1577-1586, 1596-1608, and/or 717-741 of SEQ ID NO: 328; 5-11, 17-24, 26-32, 36-43, 50-61, 67-73, 91-102, 111-126, 133-148, 154-161, 167-173, 179-195, 208-223, 230-252, 270-286, 292-306, 308-347, 352-371, 373-380, 386-395, 404-410, 418-431, 436-444, 447-460, 463-477, 486-492, 522-533, 545-553, and/or 36-133 of SEQ ID NO: 329; 4-23, 68-78, 100-107, 135-149, 152-159, and/or 1-88 of SEQ ID NO: 330; 5-12, 18-27, 35-55, 68-95, 100-109, 117-122, 129-135, 157-162, and/or 37-98 of SEQ ID NO: 331; 5-52, 64-80, 86-106, 108-155, 175-190, 223-231, 234-248, and/or 53-70 of SEQ ID NO: 332; 25-46, 59-64, 69-75, 83-90, 93-100, 107-115, 124-135, 151-177, 183-189, 194-206, 209-215, 219-224, 251-263, 267-276, 305-311, 318-327, 332-338, 350-356, 380-396, 406-412, 414-423, 431-437, 453-461, 463-481, 483-491, 505-510, 513-523, 528-545, 568-575, and/or 226-275 of SEQ ID NO: 333; 5-29, 37-43, 47-54, 61-70, and/or 31-65 of SEQ ID NO: 334; 10-35, 42-59, 65-70, 76-85, 92-104, 149-155, 184-191, 234-243, 248-259, 268-277, 383-389, 391-398, 410-430, 445-454, 488-504, 518-523, 530-538, 574-590, 615-623, 627-633, 652-660, 662-670, 674-683, 703-714, 720-728, 731-737, 751-757, and/or 547-572 of SEQ ID NO: 335; 5-12, 39-51, 57-64, 67-84, 86-108, 124-130, 138-159, 167-179, 181-202, 226-235, and/or 133-214 of SEQ ID NO: 336; 12-20, 29-40, 57-77, 79-88, 97-103, 111-117, 119-137, 174-200, 202-218, 221-229, 231-238, 240-246, 254-264, 266-280, 296-308, 321-331, and/or 23-54 of SEQ ID NO: 337; 7-17, 19-54, 66-101, 114-133, 146-182, 193-210, 219-226, 232-238, 244-250, 253-261, 266-279, and/or 1-31 of SEQ ID NO: 338; 4-11, 17-32, 38-58, 68-111, 113-130, 132-186, 200-212, 219-227, 240-249, 256-265, 270-278, 285-305, 311-317, 328-341, 343-351, 373-386, 389-414, 419-433, 439-504, 510-535, 553-564, 588-594, 599-604, 609-618, 620-631, 635-657, 664-670, 684-703, 705-717, and/or 661-695 of SEQ ID NO: 339; 5-33, 67-78, 122-129, 141-150, 172-185, 201-209, 217-223, 235-252, 289-295, 303-316, 355-368, 383-389, 398-406, 426-437, 445-451, 459-467, 479-496, 512-517, 523-530, 535-562, 577-584, 590-605, 610-616, 618-632, 644-654, 663-669, 680-688, 70-85, and/or 271-403 of SEQ ID NO: 340; 4-53, 55-62, and/or 59-71 of SEQ ID NO: 341; 26-38, 43-63, 67-76, 78-98, 105-112, 115-121, 132-144, 148-153, 179-184, 194-203, 239-245, 261-278, 282-315, and/or 231-283 of SEQ ID NO: 342; 13-22, 24-30, 49-61, 65-72, 90-97, 99-105, 115-131, 152-160, 165-171, 176-188, 202-221, 231-250, 255-274, 280-286, 288-296, 331-337, 339-347, 350-358, 374-385, 391-408, 418-427, 438-453, 468-476, 482-490, 497-506, 526-532, 534-583, 696-702, 713-719, 730-748, 750-758, 762-776, 802-808, 825-857, 864-950, 963-1004, 1015-1023, 1046-1058, and/or 571-665 of SEQ ID NO: 343; 5-13, 18-24, 29-45, 51-58, 78-85, 87-94, 109-117, 122-128, 146-161, 175-189, and/or 1-83 of SEQ ID NO: 344; 5-17, 40-46, 50-65, 73-86, 89-98, 114-139, 151-157, 165-173, 186-195, 197-213, 215-227, 245-260, 310-315, 364-369, 405-415, 428-436, 456-464, 471-482, 507-514, 518-531, 539-565, 648-654, 681-687, 690-707, 720-731, 743-756, 764-771, 801-806, 815-828, 830-836, 204-283, and/or 287-363 of SEQ ID NO: 345; 6-27, 33-40, 62-78, 83-89, 91-99, 102-109, 115-134, 150-156, 160-170, 172-204, 233-244, and/or 109-127 of SEQ ID NO: 346; 4-11, 17-25, 31-38, 55-80, 105-113, 115-123, 160-171, 195-201, 210-222, 254-264, 290-296, 301-310, 315-321, 329-334, 349-358, 377-394, 403-409, 424-432, 452-460, 466-474, 480-495, 510-516, 527-539, 554-562, 568-579, 587-592, 599-608, 627-635, 637-646, 661-668, 702-709, 723-736, 744-766, 768-778, 785-802, 815-821, 828-835, 862-868, 876-888, 892-906, 908-918, 921-950, 192-275, and/or 394-430 of SEQ ID NO: 347; 18-26, 33-78, 80-87, 120-128, 141-182, 184-208, 251-257, 269-300, 305-311, and/or 208-230 of SEQ ID NO: 348; 11-72, 84-91, 99-109, 112-120, 143-155, 162-183, 188-197, 222-231, and/or 30-176 of SEQ ID NO: 349; 4-17, 41-56, 61-67, 74-109, 142-149, 158-185, 193-210, 216-236, 241-249, and/or 84-162 of SEQ ID NO: 350; 8-45, 135-140, 176-182, 189-196, 206-216, 218-235, 260-269, 272-278, 307-313, 331-344, 352-359, 371-395, 403-414, 416-422, 426-438, 451-470, 478-484, 493-502, 504-511, 514-525, 527-534, and/or 104-180 of SEQ ID NO: 351; 6-25, 49-59, 65-94, 107-115, 117-124, 135-151, 176-185, 203-209, and/or 145-173 of SEQ ID NO: 352; 5-15, 46-56, 58-81, 83-111, 118-138, 146-158, 165-175, and/or 9-46 of SEQ ID NO: 353; 7-15, 36-43, 54-60, 65-73, 88-94, 107-113, 122-128, 134-141, 162-171, 182-216, 218-235, 249-258, 266-278, 290-301, 308-338, 362-368, and/or 100-141 of SEQ ID NO: 354; 4-14, 19-24, 27-36, 38-51, 59-73, 90-96, 102-121, 138-150, 157-174, 176-202, 212-225, 229-241, 250-258, 261-268, 279-291, 293-310, 319-338, 358-368, 371-389, 393-398, 404-413, 416-433, 435-442, 458-471, and/or 327-355 of SEQ ID NO: 355; 10-15, 32-49, 61-69, 97-103, 128-134, 143-154, 164-179, and/or 99-124 of SEQ ID NO: 356; 6-37, 40-48, 56-68, 108-127, 135-141, 145-163, 170-179, 207-216, 224-234, 238-244, 249-261, 266-283, 352-363, 371-378, 380-392, 447-454, 468-489, 497-503, 505-510, and/or 434-465 of SEQ ID NO: 357; 6-33, 46-68, 78-84, 120-131, 135-142, 183-188, 201-219, 227-233, 236-244, 246-252, 282-295, 307-315, 335-350, 392-399, 409-414, 427-433, 435-447, 468-482, 487-494, 500-506, 529-537, 543-550, 555-575, 577-584, 606-611, 619-625, 637-651, 682-711, 713-727, 729-738, 756-764, 783-795, 801-815, 817-830, 833-847, 861-890, 898-904, 909-928, and/or 406-428 of SEQ ID NO: 358; 7-17, 36-53, and/or 41-65 of SEQ ID NO: 359; 4-10, 17-24, 28-34, 42-49, 55-61, 70-106, 112-127, 135-142, 154-172, 178-184, 187-201, 213-219, 225-230, 235-246, 253-260, 267-302, 318-331, 339-353, 363-373, 376-387, and/or 258-268 of SEQ ID NO: 360; 8-17, 29-43, 45-52, 58-69, 87-100, 102-111, 148-163, 172-187, 190-208, 210-227, 232-239, 245-253, 258-263, 286-299, 313-334, 346-362, 373-388, 391-411, 425-430, 434-446, 457-489, 496-502, 518-524, 537-546, 555-560, 602-610, 637-646, 676-689, 698-704, 706-742, 750-778, 780-791, 806-842, 864-879, 881-888, 890-899, 901-908, 910-921, 941-947, 953-959, 967-980, 990-995, 1000-1061, 1073-1079, 1081-1092, 1096-1118, 1121-1185, 1195-1209, 1219-1232, 1237-1243, 1250-1274, 1276-1282, 1302-1317, 1324-1333, 1339-1344, 1349-1361, 1370-1376, 1406-1413, 1415-1427, 1433-1450, 1453-1469, 1473-1478, 1482-1495, 1509-1517, 1519-1526, and/or 611-689of SEQ ID NO: 361; 7-29, 74-83, 101-107, 115-124, 127-142, 166-184, 209-215, 222-232, 245-252, 255-262, and/or 40-60 of SEQ ID NO: 362; 4-14, 16-32, 42-47, 65-71, 82-109, 128-145, 158-171, 177-191, 197-228, 230-236, and/or 138-167 of SEQ ID NO: 363; 4-22, 47-59, 61-71, 76-82, 96-103, 119-146, 165-172, 174-188, 191-202, 214-232, 240-247, 267-273, 278-293, 303-323, 326-340, 348-353, 365-387, 389-398, 405-411, 416-421, 423-451, 453-480, 482-495, 507-512, 518-529, 537-545, 563-570, 581-587, 591-597, 611-624, 626-634, 637-647, 671-692, 694-725, 735-742, 747-768, 786-825, 859-875, 887-894, 897-909, 915-938, 943-954, 967-976, 984-1001, 1006-1015, and/or 943-1016 of SEQ ID NO: 364; 4-14, 24-34, 47-69, 81-90, 98-112, 144-153, 161-169, 189-196, 202-208, 213-220, 243-249, 256-262, 265-271, 279-285, 299-307, 310-324, 326-345, 356-369, 397-416, 424-429, 432-441, and/or 361-403 of SEQ ID NO: 365; 4-22, 27-40, 44-54, 77-91, 112-127, 155-161, 196-207, 210-216, 228-234, and/or 171-210of SEQ ID NO: 366; 4-9, 14-23, 50-56, 59-68, 77-102, 111-120, 126-152, 161-167, 174-180, 189-202, 204-228, 237-245, 259-266, 278-285, 300-309, and/or 113-157 of SEQ ID NO: 367; 6-26, 31-37, 41-47, 62-69, 71-93, 106-119, 126-136, 167-180, 196-202, 210-216, 242-254, 258-264, 272-286, 292-298, 300-309, 312-322, 346-352, 354-380, 385-392, 401-420, 434-449, 451-459, 465-473, 497-514, 555-562, 566-574, 604-612, 642-648, 657-669, and/or 517-643 of SEQ ID NO: 368; 23-35, 71-77, 94-100, 134-140, 157-163, 185-191, 228-237, 255-265, 269-283, 310-315, 334-340, 366-392, 395-400, 404-411, 423-428, 434-445, 451-458, 468-478, 496-508, 512-519, 558-563, 565-582, 11-149, and/or 507-577 of SEQ ID NO: 369; 14-20, 35-48, 53-63, 71-77, 95-101, 114-121, 123-130, 144-151, 153-160, 162-170, 187-197, 201-211, and/or 23-52 of SEQ ID NO: 370; 7-17, 24-44, 63-70, 88-99, and/or 1-78 of SEQ ID NO: 371; 21-39, 46-53, 68-96, 107-113, 118-124, 126-135, 158-185, 196-202, 204-213, 219-226, 246-253, 267-275, 277-285, 299-317, 319-338, 404-410, 421-428, 435-463, 92-170, and/or 178-199 of SEQ ID NO: 372; 28-43, 47-55, 59-68, 72-79, 106-112, 121-139, 151-160, 168-175, 177-183, 194-212, 223-229, 232-248, 254-263, 270-276, 317-323, 331-338, 342-356, 363-369, 378-391, 415-424, 432-441, 443-456, 464-470, 499-505, 521-527, 534-552, 586-599, 624-634, 639-647, 651-667, 685-690, 694-702, 711-731, 733-744, 752-776, 784-791, 801-807, 837-859, 879-890, 906-914, 918-924, 926-940, 945-958, 965-971, 980-1002, 1010-1016, 1018-1028, 1034-1044, 1046-1053, 1065-1075, 1079-1092, 1095-1104, 1125-1142, 1154-1162, 1176-1181, 1194-1207, 1233-1244, 1252-1261, 1267-1274, 1283-1288, 1318-1324, 1327-1342, and/or 403-455 of SEQ ID NO: 373; 17-25, 32-77, 82-91, 100-128, 163-169, 189-207, 211-218, 227-232, 239-245, 255-260, 278-300, 311-325, 342-356, 382-390, 393-401, 416-460, 467-487, 491-497, 505-512, 516-532, 551-565, 568-575, 594-601, 610-632, 638-643, 647-670, 672-685, 699-710, 712-726, and/or 290-399 of SEQ ID NO: 374; 4-39, 56-73, 107-128, 134-142, 144-153, 155-183, 198-203, 205-212, 215-223, 232-244, 248-265, 273-292, 294-301, 304-311, 322-329, 338-343, 369-378, 397-404, 408-416, 420-426, 436-443, and/or 177-199 of SEQ ID NO: 375; 4-22, 25-31, 35-41, 53-61, 74-83, 101-145, 157-162, 199-216, 247-257, 266-276, 282-289, 291-298, 306-313, 324-335, 345-353, 360-368, 392-400, 404-421, 432-445, 455-462, 478-486, 494-499, 501-511, 525-551, 554-561, 581-588, 600-613, 637-661, 669-676, 684-697, 699-705, 720-730, 746-751, and/or 393-543 of SEQ ID NO: 376; 11-25, 65-79, 89-97, 106-112, 115-121, 126-132, 134-141, 218-230, 255-260, 287-294, 304-309, 328-334, 339-345, 347-363, 366-382, 421-428, 457-463, 471-477, 484-492, 504-511, 513-518, 547-554, 559-572, 598-604, 617-628, 641-647, 658-665, 691-696, 701-714, 744-751, 760-770, 774-780, 792-801, 805-817, and/or 635-686 of SEQ ID NO: 377; 5-25, 31-39, 72-79, 93-102, 104-110, 122-132, 138-146, 157-189, 192-198, 205-214, 226-233, 240-248, 269-275, 282-298, 304-310, 313-327, 342-348, and/or 74-108 of SEQ ID NO: 378; 7-34, 44-50, 54-64, 90-99, 101-106, 111-123, 156-175, 182-212, 224-232, 235-247, 249-264, 266-273, 306-321, 326-333, 343-351, 359-365, 370-403, 424-455, 466-477, 481-495, 503-511, 516-531, 534-543, 555-573, 578-600, 638-650, 657-671, 677-682, 686-692, 698-710, 721-729, 732-741, 752-763, 773-784, 786-809, 816-821, 829-849, 885-894, 911-920, 931-940, 942-949, 954-962, 979-986, 988-995, 1007-1016, 1034-1039, 1060-1065, 1076-1093, 1131-1137, 1144-1152, 1160-1165, 1170-1181, 1186-1196, 1220-1260, 1271-1280, 1287-1295, 1318-1328, 1346-1356, 1361-1367, 1378-1392, 1401-1407, 1412-1420, 1426-1443, 1478-1489, 1491-1499, 1501-1525, and/or 1352-1387 of SEQ ID NO: 379; 18-53, 64-93, 95-105, 124-135, 143-148, 155-161, 163-171, 184-198, 238-245, 258-271, 273-284, 287-292, 302-310, 312-320, 322-341, 349-365, 377-403, 407-414, 417-423, 444-453, 455-469, 471-495, 503-511, 536-557, 579-586, 588-609, 619-626, 632-638, 643-649, 656-663, 669-680, 682-688, 699-714, 729-739, 755-761, 768-776, 781-793, 801-815, 821-826, 833-842, 863-869, and/or 7-84 of SEQ ID NO: 380; 8-15, 24-40, 51-65, 78-89, 102-111, 117-154, 164-177, 181-192, 198-209, 216-222, 230-237, 241-248, 254-268, 285-293, 298-321, 331-338, 366-373, 379-389, 392-415, 429-439, 441-451, 453-459, 471-486, 489-501, 524-535, and/or 1-26 of SEQ ID NO: 381; 10-18, 26-38, 48-54, 60-69, 77-83, 88-95, 119-126, 133-169, 172-185, 193-206, 214-225, 236-250, 255-261, 269-275, 278-301, 320-329, 336-341, 345-353, 356-369, 389-397, and/or 64-88 of SEQ ID NO: 382; 27-32, 37-50, 68-82, 84-108, 134-145, 147-154, 162-170, 172-182, 194-200, 205-224, 232-270, 293-299, 312-328, and/or 86-134 of SEQ ID NO: 383; 7-13, 18-44, 64-74, 81-86, 94-104, 134-148, 153-159, 174-183, 204-225, 228-243, 248-255, 283-295, 297-303, 320-347, and/or 100-141 of SEQ ID NO: 384; 4-27, 36-42, 55-62, 64-73, 92-106, 112-118, 120-127, 135-154, 170-179, 242-257, 270-277, 286-325, 335-341, 359-365, 381-387, 410-440, 470-478, 520-528, 543-553, 575-582, 603-612, 617-623, 628-649, 657-663, 685-691, 693-699, 703-708, 712-719, 740-747, 755-763, 766-782, 800-809, 811-833, 835-851, 856-862, 864-876, and/or 344-369 of SEQ ID NO: 385; 4-10, 15-24, 26-53, 55-71, 78-83, 90-113, 128-148, 156-163, 165-179, 203-213, 228-239, 250-259, 277-285, 292-314, 322-330, 334-340, 345-360, 381-396, 404-409, 416-427, and/or 204-232 of SEQ ID NO: 386; 4-17, 21-30, 42-49, 56-63, 67-73, 78-87, 92-99, 105-111, 122-130, 151-160, 168-197, 209-226, 243-276, 286-293, 295-301, 306-319, 322-332, 335-342, and/or 104-126 of SEQ ID NO: 387; 4-10, 12-23, 28-34, 37-60, 65-84, 97-103, 113-127, 135-143, 182-187, 200-223, 227-233, 236-271, 274-279, 282-287, 293-299, 314-329, 334-358, and/or 300-362 of SEQ ID NO: 388; 20-32, 37-46, 48-65, 75-83, 86-95, 121-133, 138-151, 183-190, 199-205, 216-227, and/or 1-38 of SEQ ID NO: 389; 9-25, 29-48, 50-100, 102-126, 131-149, 167-173, 210-217, 224-256, 259-270, 275-292, 295-301, 308-313, 319-335, 337-359, 362-382, 393-423, 436-449, 468-476, 481-487, 492-500, 526-534, 537-548, 560-567, 569-579, 590-598, 604-613, 629-636, 644-656, and/or 506-577 of SEQ ID NO: 390; 25-45, 53-78, 80-102, 116-128, 161-167, 180-186, 193-219, 235-258, 261-268, 291-318, and/or 214-233 of SEQ ID NO: 391; 4-18, 25-31, 33-39, 47-53, 64-92, 97-106, 123-129, 134-146, 165-171, 173-190, 192-213, 226-239, 251-273, 283-298, 316-324, 339-345, 350-356, 361-376, 400-408, 418-440, 444-451, 476-481, 505-516, 524-542, 555-563, 581-594, 607-629, 634-641, 647-670, 711-719, 728-738, 755-765, 772-780, 800-815, 822-833, 842-852, 860-865, 874-880, 891-913, 926-938, 941-946, 961-978, 984-990, 1013-1024, 1052-1092, 1099-1111, 1120-1140, 1153-1168, 1170-1190, 1193-1211, 1221-1233, 1253-1264, 1268-1274, 1283-1289, 1295-1300, 1303-1327, 1338-1351, 1362-1368, 1391-1396, 1403-1416, 1429-1436, 1471-1477, 1483-1513, 1526-1555, 1585-1591, 1596-1630, 1632-1639, and/or 299-326 of SEQ ID NO: 392; 10-25, 34-54, 57-67, 77-96, 111-121, 127-139, 151-157, 161-179, 183-198, 201-219, 233-239, 247-252, 268-276, 283-294, 299-309, 319-324, and/or 156-268 of SEQ ID NO: 393; 6-28, 34-45, 64-79, 88-95, 98-115, 120-141, 159-167, 174-179, 186-192, 198-208, 216-225, 232-246, 248-273, 275-283, 291-299, 304-316, 370-381, 386-393, 401-417, 421-445, 460-468, 470-487, 497-509, 511-535, 542-558, 564-574, 603-609, 619-648, 661-675, 682-694, 720-738, 742-759, 762-788, 793-805, 825-851, 885-893, 898-906, 918-935, 941-953, 971-978, 986-993, 1001-1017, 1019-1026, 1050-1070, 1072-1089, 1097-1102, 1107-1121, and/or 934-1003 of SEQ ID NO: 394; 6-13, 31-38, 47-60, 71-102, 107-124, 128-155, 173-180, 213-220, and/or 202-243 of SEQ ID NO: 395; 4-38, 49-71, 75-85, 110-115, 168-173, 202-210, 221-228, 240-245, 258-264, 302-316, 348-362, 386-391, 456-462, 474-483, 494-499, 511-516, 523-528, 533-539, 549-557, 579-585, 587-593, 618-625, 627-634, 654-660, 664-670, 682-688, 697-702, 729-735, 783-793, 804-812, 817-829, 862-868, 908-920, 954-960, 1000-1006, 1008-1031, 1044-1050, 1069-1077, 1079-1084, 1097-1118, 1139-1146, 1152-1158, 1165-1176, 1181-1186, 1201-1213, 1261-1267, 1272-1280, 1282-1289, 1358-1364, 1373-1382, 1390-1400, 1443-1450, 1497-1505, 1530-1552, 1560-1568, 454-483, and/or 1142-1349 of SEQ ID NO: 396; 4-13, 20-34, 47-53, 58-65, 76-82, 89-106, 139-160, 165-182, 191-205, and/or 10-41 of SEQ ID NO: 397; 31-42, 59-75, 91-102, 104-123, 147-153, 172-184, 193-206, 257-266, 306-316, 318-329, and/or 4-34 of SEQ ID NO: 398; 5-14, 26-35, 38-45, 54-60, 63-79, 121-127, 137-145, 152-162, 167-173, 175-183, 191-202, 218-228, 238-263, 278-295, 303-316, 320-335, 337-345, 359-365, 382-400, and/or 64-148 of SEQ ID NO: 399; 4-17, 31-39, 46-61, 68-73, 76-97, 128-139, 150-156, 166-172, 174-182, 184-215, 219-225, 238-245, 249-262, and/or 187-223 of SEQ ID NO: 400; 4-23, 30-41, 44-53, 58-70, 82-91, 107-114, 122-129, 148-155, 201-207, 223-232, and/or 1-69 of SEQ ID NO: 401; 4-16, 28-41, 44-52, 60-66, 73-82, 92-101, 108-114, 133-138, 145-155, 177-185, 194-202, and/or 89-130 of SEQ ID NO: 402; 4-9, 21-39, 72-78, 82-88, 99-131, 136-143, 151-162, 164-187, 189-204, 208-216, 223-229, 232-240, 246-256, 269-283, 288-299, 311-321, 328-335, and/or 209-237 of SEQ ID NO: 403; 4-14, 36-48, 66-73, 75-89, 95-103, 115-123, 128-133, 140-145, 151-158, 165-176, 178-188, 224-254, 267-278, 289-297, 302-311, and/or 178-262 of SEQ ID NO: 404; 19-25, 55-70, 76-82, 88-107, 114-129, 136-145, 154-177, 205-219, 227-233, and/or 1-35 of SEQ ID NO: 405; 26-33, 39-45, 50-62, 76-85, 87-101, 116-131, 142-152, 154-186, 193-199, 201-217, 221-243, 266-272, 281-298, 324-330, 335-342, 345-355, 375-383, 407-413, 254-315, and/or 323-407 of SEQ ID NO: 406; 4-22, 27-36, 60-69, 90-98, 107-113, 117-123, 127-134, 137-151, 154-161, 169-178, 185-192, 202-208, 214-223, 230-239, 245-255, 266-275, 307-317, 323-337, 339-353, 361-379, 385-391, 393-401, 415-422, 424-429, 434-442, 444-449, 470-480, and/or 358-400 of SEQ ID NO: 407; 4-25, 31-42, 83-101, 109-123, 127-136, 139-145, 154-166, 169-182, 194-201, 210-220, 226-237, 251-275, 277-304, 309-329, 341-362, 367-372, 377-393, 400-406, and/or 223-239 of SEQ ID NO: 408; 4-22, 29-34, 37-44, 48-78, 98-110, 127-142, 144-156, 158-165, and/or 59-127 of SEQ ID NO: 409; 4-12, 14-20, 27-34, 39-47, 51-67, 69-81, 89-97, 105-119, 121-133, 140-149, 151-161, and/or 67-105 of SEQ ID NO: 410; 6-19, 25-35, 43-48, 56-69, 73-93, 137-146, 152-161, 164-207, 212-229, 236-241, 244-250, 273-288, 292-299, 314-324, and/or 259-291 of SEQ ID NO: 411; 17-24, 34-40, 78-85, 227-233, 294-315, 327-335, 345-351, 354-359, 363-368, 388-403, 405-411, 413-419, 425-434, 462-472, 480-500, 528-536, 542-560, 566-573, 579-589, 593-606, 614-646, 651-658, 663-669, 686-726, 734-747, 754-778, 787-806, 809-825, 827-839, 876-887, and/or 80-214 of SEQ ID NO: 412; 4-9, 15-29, 38-43, 50-81, 83-96, 98-108, 116-122, 136-143, and/or 133-148 of SEQ ID NO: 413; 5-79, 98-105, 133-146, 158-182, 189-207, 213-225, 231-252, 272-278, 283-303, 312-317, 333-346, 361-367, 370-379, 387-419, 421-433, 439-453, 460-468, and/or 132-153 of SEQ ID NO: 414; 9-29, 35-40, 49-63, 69-76, 110-134, 141-147, 160-169, and/or 63-101 of SEQ ID NO: 415; 4-9, 13-20, 25-43, 50-56, 75-86, 102-115, 120-126, 128-135, 139-145, 161-166, 170-189, 202-210, 212-219, 221-232, 240-248, 252-264, 54-161, and/or 256-285 of SEQ ID NO: 416; 7-17, 19-33, 44-51, 56-70, 74-79, 85-93, 96-102, 110-117, 124-132, 140-148, 157-176, 204-248, 256-269, 289-306, 318-324, 331-339, 377-382, 389-397, 399-411, 413-420, 424-432, 436-441, 462-469, 499-506, 522-547, 549-563, 569-575, 578-594, 609-614, 621-630, 637-646, 652-685, 688-711, 713-724, 739-744, 752-783, 793-799, 811-823, 825-841, 846-855, 861-868, 874-886, 895-907, 935-966, 977-1024, 1026-1035, 1037-1055, 1063-1091, 1094-1103, 1105-1119, 1128-1149, 1160-1173, 1182-1194, 1210-1222, 1227-1234, 1244-1258, 1275-1285, 1293-1300, 1316-1322, 1336-1354, 1357-1364, 1367-1372, 1386-1392, 1403-1411, 1424-1430, 1439-1456, 1458-1469, 1485-1504, 1018-1052, and/or 1134-1262 of SEQ ID NO: 417; 4-30, 32-42, 59-65, 78-88, 104-127, 132-147, 158-171, 181-187, 195-214, 220-226, 238-269, and/or 6-90 of SEQ ID NO: 418; 10-16, 25-53, 64-74, and/or 1-83 of SEQ ID NO: 419; 4-29, 48-57, 75-86, 99-113, 146-155, 164-174, 190-201, 215-234, 236-251, and/or 101-185 of SEQ ID NO: 420; 4-9, 32-56, 58-67, 71-81, 90-95, 97-105, 112-118, 124-132, 138-144, 147-167, 170-177, 211-217, 231-241, 250-258, 260-272, 274-282, 289-296, 299-309, 319-331, 344-350, 356-362, 368-377, 381-394, 399-406, 412-430, 432-450, 459-473, 486-503, 508-515, 520-548, 564-570, 581-587, 616-623, 628-635, 638-660, 678-684, 691-696, 703-709, 716-723, 760-772, 787-795, 835-844, and/or 177-207 of SEQ ID NO: 421; 5-43, 46-81, 88-95, 137-142, 163-191, 195-203, 210-235, 241-254, 256-276, 280-288, 292-305, 307-313, 317-333, 335-343, 347-353, 357-363, 372-381, 384-389, 399-409, and/or 58-179 of SEQ ID NO: 422; 26-32, 38-44, 68-75, 85-100, 104-114, 126-132, 140-150, 153-164, 175-193, 200-209, 218-224, 226-232, 243-249, 251-260, 275-293, 304-329, 335-353, 364-479, 485-490, 500-512, 514-523, 532-556, 577-589, 622-628, 631-653, 656-678, 542-627, and/or 691-724 of SEQ ID NO: 423; 8-22, 25-30, 46-62, 67-73, 98-103, 105-114, 120-141, 144-153, 168-175, 181-193, 198-204, 208-227, 235-242, 249-258, 281-288, 291-306, 327-336, 340-361, 368-380, 389-409, 417-426, 428-435, 442-453, 468-486, 488-496, 498-509, 511-523, 540-553, 566-579, 587-603, 629-636, 677-682, and/or 170-207 of SEQ ID NO: 424; 9-25, 41-61, 68-75, 81-102, 106-141, 158-165, 173-191, and/or 32-53 of SEQ ID NO: 425; 7-26, 28-37, 43-58, 67-79, 92-99, 103-111, 118-128, 130-139, 152-165, 170-186, 192-214, 216-223, 225-251, and/or 95-122 of SEQ ID NO: 426; 4-16, 21-36, 38-47, 54-64, 92-103, 117-126, 134-155, 157-200, 202-223, 246-262, and/or 70-163 of SEQ ID NO: 427; 30-38, 45-51, 75-90, 93-114, 119-127, 134-143, 151-159, 166-180, 189-207, 217-222, 230-239, 267-276, 283-292, 324-350, 374-386, 392-403, 409-416, 418-424, 451-458, 466-477, 483-494, 501-509, 521-528, 540-549, 556-561, 573-579, 581-588, 621-626, 628-636, 654-661, 695-701, 711-717, 734-743, 751-757, 764-771, 789-798, 832-837, 860-867, 869-883, 911-917, 942-950, 958-964, 966-981, 992-999, 44-131, and/or 484-615 of SEQ ID NO: 428; 5-14, 27-42, 48-67, 71-83, 85-91, 105-112, 114-135, 139-147, 159-165, 169-185, 188-195, 199-208, 212-221, 231-253, 264-272, 275-282, 290-303, 309-319, 324-331, 340-358, 380-405, 419-425, 438-444, 450-463, 468-477, 497-514, 520-533, 549-556, 568-574, 617-626, 637-643, 661-668, 674-684, 705-713, 718-733, 735-775, and/or 541-569 of SEQ ID NO: 429; 13-19, 21-32, 45-69, 79-87, 90-109, 140-148, 156-208, 215-232, 243-274, 276-284, 288-298, 301-316, 339-347, 369-384, 405-412, 430-437, 445-457, 464-470, 475-483, 490-509, 517-524, 532-591, 609-628, 647-677, 681-709, 731-740, 752-767, 770-781, 787-793, 798-807, 825-836, 839-869, and/or 104-137 of SEQ ID NO: 430; 4-10, 33-44, 73-78, 93-101, 123-129, 135-165, 201-214, 251-261, 268-274, 285-292, 316-322, 328-336, 342-350, 353-360, 374-387, 391-399, 401-406, 417-425, 437-443, 447-454, 511-522, 530-535, 727-737, 762-774, 781-787, 803-809, 827-838, 852-859, 877-883, 901-907, 910-918, 951-956, 996-1002, 1071-1079, 1086-1096, 1098-1104, 1106-1119, 1129-1135, 1142-1148, 1155-1161, 1167-1185, 1199-1205, 1224-1232, 1242-1251, 1279-1287, 1293-1299, 1305-1321, 1372-1396, 1426-1435, 1467-1473, 1479-1492, 1526-1533, 1548-1558, 1578-1585, and/or 1520-1553 of SEQ ID NO: 431; 4-10, 36-45, 56-92, 108-114, 125-133, 137-146, 156-162, 164-186, 194-203, 225-234, 242-251, 272-283, 285-306, 310-315, 322-330, 358-371, 373-379, 389-396, and/or 95-189 of SEQ ID NO: 432; 4-32, 38-46, 66-83, 88-95, 110-118, 123-141, 169-180, 200-208, 217-225, 237-245, 247-261, 263-272, 275-282, 291-302, 310-338, 345-353, 360-369, 371-378, 386-394, 398-413, 416-422, 437-448, and/or 51-81 of SEQ ID NO: 433; 4-10, 12-38, 59-64, 81-97, 122-132, 136-142, 149-165, 180-187, 192-199, 205-216, 222-228, 244-251, 255-274, 280-286, 294-320, 327-333, 339-346, 353-359, 372-385, 402-408, 413-420, 433-440, 443-453, 456-461, 464-472, 483-495, and/or 14-27 of SEQ ID NO: 434; 4-40, 42-56, 59-73, 76-110, 115-128, 132-139, 148-170, 174-195, 197-207, 214-220, 222-236, 238-246, 252-283, 291-326, 334-413, and/or 239-261 of SEQ ID NO: 435; 4-11, 18-26, 31-47, 59-68, 74-92, 98-144, 149-158, 173-180, 200-210, 216-223, 239-250, and/or 18-66 of SEQ ID NO: 436; 4-30, 42-52, 59-67, 70-76, 80-86, 138-147, 154-159, 206-217, 226-232, 240-248, 250-257, 259-265, 280-294, 299-326, 328-334, 340-355, 393-398, 415-422, 440-447, 452-458, and/or 375-452 of SEQ ID NO: 437; 4-12, 20-31, 43-49, 100-118, 121-138, 141-148, 153-161, 167-177, 206-213, 225-231, 235-240, 256-267, 277-287, 301-322, 325-333, 336-360, 381-388, 400-415, 447-452, 459-472, and/or 55-75 of SEQ ID NO: 438; 4-10, 29-56, 93-99, 119-124, 133-140, 159-171, 187-195, 200-214, 221-232, 249-255, 263-271, 285-291, 310-316, and/or61-198 of SEQ ID NO: 439; 9-15, 48-65, 72-79, 87-102, 104-115, 118-124, 126-138, 153-185, 188-207, 212-239, 257-265, 297-304, 306-313, and/or 1-54 of SEQ ID NO: 440; 18-38, 48-62, 68-107, 143-158, 167-181, 193-198, 205-213, 220-231, 239-245, 258-264, 279-300, 308-314, 318-328, 343-354, 360-367, 425-433, 465-474, 496-505, 508-514, 529-536, 545-562, 572-580, 587-593, 595-609, 612-618, 627-637, 642-649, 652-673, 688-693, 696-701, 707-736, 748-754, 766-776, 779-786, 791-797, 815-825, 830-842, 857-865, 868-876, 880-887, 898-905, 911-923, 925-936, 961-983, 1011-1018, 1043-1059, 1073-1079, 1093-1104, 1110-1116, 1135-1144, 1146-1163, 1183-1189, 1196-1204, 1222-1242, 1250-1262, 1275-1296, 1322-1330, and/or 1056-1199 of SEQ ID NO: 441; 15-27, 35-40, 47-55, 57-73, 77-93, 103-112, 126-138, 141-179, 192-218, 224-237, 244-257, 263-278, and/or 83-115 of SEQ ID NO: 442; 4-22, 24-29, 36-43, 63-75, 90-96, 118-128, 137-145, 168-182, 198-210, 212-221, 242-250, 289-316, 318-323, 327-339, 381-387, 401-411, 424-434, 443-449, 453-465, 485-498, 500-508, 510-515, 521-528, 538-545, 554-560, 574-606, 619-627, 645-658, 681-688, 70-79, and/or 473-516 of SEQ ID NO: 443; 8-18, 45-50, 52-62, 76-82, 84-107, 109-116, 130-137, 141-150, 152-158, 164-170, 175-186, 188-196, and/or 9-73 of SEQ ID NO: 444; 4-24, 39-46, 84-95, 133-151, 166-174, 179-189, 196-203, 212-218, 223-236, 240-246, 255-261, 266-275, 286-293, 299-316, 323-331, 347-358, 368-380, 382-389, 391-398, 410-417, 420-429, 437-445, 451-456, 464-471, 504-514, 523-532, 539-545, 553-567, 572-588, 594-603, 620-630, 636-641, 656-663, 665-672, 676-687, 693-700, 40-166, and/or 577-605 of SEQ ID NO: 445; 4-42, 48-59, 74-90, 92-119, 121-149, 163-180, 185-192, 199-209, and/or 1-9 of SEQ ID NO: 446; 5-26, 60-76, 104-114, 119-128, 136-141, 156-167, 186-198, 218-237, 260-267, 275-290, 328-335, and/or 294-334 of SEQ ID NO: 447; 4-10, 14-37, 40-47, 68-77, 87-95, 103-111, 116-153, 170-237, 245-251, 253-274, 280-299, 311-318, 321-338, 364-371, 378-392, 395-430, 438-451, 458-475, 479-507, 520-526, 542-560, 573-586, 591-598, 608-614, 636-668, 678-690, 692-698, 702-717, 724-731, and/or 302-448 of SEQ ID NO: 448; 5-17, 23-48, 60-73, 75-82, 98-108, 110-128, 146-160, 168-180, 191-213, 229-237, 240-252, 269-277, 305-313, and/or 63-147 of SEQ ID NO: 449; 4-10, 19-35, 41-47, 51-60, 70-80, 91-115, 170-191, 194-211, 226-232, 234-241, 256-273, 289-294, 311-349, 358-363, 392-400, 406-416, and/or 356-391 of SEQ ID NO: 450; 5-25, 50-57, 67-75, 78-86, 94-112, 122-145, 152-165, 171-183, 193-199, 217-235, 238-253, 255-264, 281-287, 294-303, 309-314, 319-324, 327-341, 349-355, 364-382, 384-392, 397-411, 419-427, 435-452, 455-463, 488-504, 536-541, 558-563, 568-574, 595-601, 614-620, 637-644, and/or 7-127 of SEQ ID NO: 451; 10-16, 39-45, 62-91, 102-114, 120-127, 136-147, 152-159, 163-173, 178-188, 196-217, 223-231, 234-254, 257-267, 270-283, 290-300, 306-312, and/or 224-295 of SEQ ID NO: 452; 4-9, 12-21, 23-52, 54-65, 74-83, 103-117, 131-141, 144-163, 171-177, 183-189, 205-212, 252-262, 297-304, 308-314, 320-329, 343-349, 357-370, 375-380, 395-405, 434-441, 456-465, 474-484, 505-514, 528-536, 540-549, 576-582, 597-607, 616-622, 634-641, 648-654, 690-713, 715-724, 743-751, 757-763, 772-789, 791-802, 809-814, 828-837, 840-846, 853-875, and/or 283-379 of SEQ ID NO: 453; 4-27, 40-46, 55-62, 84-100, 108-114, 118-123, 132-145, 165-171, 178-183, 192-223, 226-232, 234-243, 276-282, 299-305, 326-334, 340-351, 357-371, 374-387, 395-406, 417-437, 443-452, 470-478, 485-494, 496-503, 508-521, 527-537, 541-546, and/or 252-272 of SEQ ID NO: 454; 4-36, 45-50, 58-63, 69-80, 89-97, 99-109, 111-118, 126-132, 141-147, 172-184, 188-197, 208-215, 220-231, 236-241, 253-264, 271-280, 288-297, 342-347, 361-367, 375-382, 388-394, 401-406, 408-414, 441-447, 452-458, 466-476, 483-491, 503-510, 521-528, 539-545, 547-558, 566-576, 584-589, 606-617, 624-636, and/or 418-432 of SEQ ID NO: 455; 7-14, 5-32, 6-72, 95-100, 108-114, 123-135, 143-153, 203-221, 224-230, 260-269, 290-297, 302-308, 320-328, 333-339, and/or 149-248 of SEQ ID NO: 456; 21-27, 30-48, 55-65, 70-90, 97-107, 122-128, 135-166, 172-180, 184-199, 205-224, 237-247, 252-269, 278-283, and/or 240-257 of SEQ ID NO: 457; 4-14, 20-33, 36-43, 49-60, 72-114, 117-123, 125-132, 138-143, 157-175, 184-204, 208-217, and/or 58-89 of SEQ ID NO: 458; 4-15, 23-36, 38-47, 54-64, 92-103, 117-126, 135-155, 157-200, 202-223, 231-239, 246-261, and/or 70-162 of SEQ ID NO: 459; 4-10, 35-45, 56-92, 108-114, 127-146, 160-186, 194-203, 225-234, 242-251, 272-283, 285-306, 310-315, 322-330, 358-371, 373-382, 389-396, and/or 93-188 of SEQ ID NO: 460; 18-32, 35-82, 85-115, 119-142, 149-172, and/or 4-36 of SEQ ID NO: 461; 6-14, 20-28, 35-55, 64-87, 100-109, 144-149, 189-208, 210-218, 221-227, 242-247, 254-264, 283-297, 301-308, 310-322, 351-358, 372-378, 383-389, 421-432, 447-460, 537-545, 550-558, 581-593, 595-606, 645-658, 677-688, and/or 414-503 of SEQ ID NO: 462; 9-34, 47-63, and/or 37-51 of SEQ ID NO: 463; 6-22, 50-58, 73-101, 119-128, 139-154, 167-173, 209-217, 227-234, and/or 1-126 of SEQ ID NO: 464; 10-34, 37-44, 72-78, 87-100, 111-117, 122-143, 177-196, 207-229, 232-249, 255-261, 268-278, 289-300, 315-349, 351-358, 371-378, 386-394, 404-466, 468-480, and/or 341-443 of SEQ ID NO: 465; 16-22, 30-35, 45-52, 54-64, 74-84, 90-98, 120-125, 135-148, 156-162, 166-186, 190-199, 201-215, 226-232, 262-270, 281-289, 322-331, 335-340, 367-372, 379-385, 415-426, 438-445, 455-466, 472-479, 492-497, and/or 341-484 of SEQ ID NO: 466; 4-31, 33-66, 77-83, 90-101, 118-135, 161-166, 168-189, 203-209, 216-222, 231-236, 269-277, 279-290, 298-310, 341-347, 371-376, 380-387, 389-395, 410-419, 446-455, 465-471, 476-484, 513-522, 532-537, 545-556, 560-585, 603-610, 630-657, 660-672, 694-704, 717-728, 738-745, 754-766, 782-792, 794-811, 813-819, 833-853, 901-906, 912-917, 951-979, 985-991, 998-1004, 1013-1019, 1052-1065, 1080-1086, 1124-1130, 1142-1150, 1168-1176, 1182-1193, 1209-1218, 1234-1245, 1271-1277, 1284-1298, 1301-1308, 1339-1345, and/or 529-629 of SEQ ID NO: 467; 21-28, 57-71, and/or 15-46 of SEQ ID NO: 468; 63-99, 101-109, 111-137, 143-172, 175-200, and/or 11-48 of SEQ ID NO: 469; 18-32, 35-82, 85-115, 119-142, 149-172, and/or 6-39 of SEQ ID NO: 470; 67-74, 88-94, 112-118, 127-138, 155-169, 171-180, 183-190, 196-205, 243-249, 260-271, 308-344, 346-373, 381-414, 416-457, 473-513, 515-524, 528-535, 539-544, 556-566, 572-580, 585-590, and/or 26-129 of SEQ ID NO: 471; 17-40, 47-66, 70-78, and/or 29-102 of SEQ ID NO: 472; 4-9, 23-41, 44-51, 58-64, 70-86, 94-111, and/or 47-77 of SEQ ID NO: 473; 4-22, 29-48, 50-58, 62-69, 71-78, and/or 6-35 of SEQ ID NO: 474; 8-19, 31-47, 49-58, 64-79, 84-96, and/or 7-52 of SEQ ID NO: 475; 4-17, 19-26, 41-49, 63-87, 92-99, 113-131, and/or 9-118 of SEQ ID NO: 476; 10-37, 55-68, 71-78, 92-98, 115-122, 131-138, 149-158, 163-170, 172-189, 212-219, 239-257, 259-271, 289-302, 304-320, 322-340, 359-366, 373-384, 400-412, 444-453, 460-474, 485-527, and/or 186-224 of SEQ ID NO: 477; 6-13 of SEQ ID NO: 478; 5-12 of SEQ ID NO: 480; 6-14 of SEQ ID NO: 481; 4-10 of SEQ ID NO: 483; 4-19 of SEQ ID NO: 486; 9-14 of SEQ ID NO: 487; 4-44, 47-60, 65-72, 92-98, and/or 61-95 of SEQ ID NO: 488; 2-17 of SEQ ID NO: 489; 19-29, 39-45, 52-59, and/or 7-32 of SEQ ID NO: 490; 6-20, 36-44, and/or 78-97 of SEQ ID NO: 491; 5-12, and/or 1-22 of SEQ ID NO: 492; 17-24, 26-41, 50-55, and/or 8-32 of SEQ ID NO: 493; 7-18, and/or 13-22 of SEQ ID NO: 494; 24-32, and/or 3-28 of SEQ ID NO: 495; 6-11, 14-35, 40-56, and/or 17-35 of SEQ ID NO: 496; 4-12, 17-23, 42-53, 69-81, and/or 45-64 of SEQ ID NO: 497; 4-25, 28-34, 37-43, 59-69, 104-114, and/or 52-117 of SEQ ID NO: 498; 4-12, and/or 4-22 of SEQ ID NO: 499; 4-9, and/or 1-19 of SEQ ID NO: 500; 4-22, and/or 2-19 of SEQ ID NO: 501; 13-36, 48-63, 80-101, 141-149, 165-176, 184-198, and/or 28-54 of SEQ ID NO: 502; 4-14, 21-26, and/or 21-29 of SEQ ID NO: 503; 4-26, and/or 20-36 of SEQ ID NO: 504; 4-13, and/or 7-22 of SEQ ID NO: 505; 7-13, 21-34, and/or 26-54 of SEQ ID NO: 506; 4-21, 25-44, 59-68, and/or 1-92 of SEQ ID NO: 507; 4-14, 26-33, and/or 12-33 of SEQ ID NO: 508; 12-31, 46-60, 87-94, and/or 1-98 of SEQ ID NO: 509; 5-14, and/or 4-22 of SEQ ID NO: 510; 6-15, 34-52, and/or 14-36 of SEQ ID NO: 511; 5-18, 27-33, 40-48, and/or 17-39 of SEQ ID NO: 512; 8-17, 63-70, 89-100, and/or 21-52 of SEQ ID NO: 513; 4-18, 21-31, 51-68, and/or 34-66 of SEQ ID NO: 514; 4-9, 14-19, and/or 3-31 of SEQ ID NO: 515; 4-10, 21-30, 37-51, and/or 11-44 of SEQ ID NO: 516; 4-9, 32-38, and/or 7-22 of SEQ ID NO: 517; 4-22, 29-36, 38-47, and/or 12-43 of SEQ ID NO: 518; 4-12, 14-23, and/or 26-37 of SEQ ID NO: 519; 4-11, 20-46, and/or 32-59 of SEQ ID NO: 520; 4-10, and/or 1-30 of SEQ ID NO: 521; 4-28, 32-50, and/or 17-51 of SEQ ID NO: 522; 14-28, and/or 2-14 of SEQ ID NO: 523; 4-25, and/or 12-40 of SEQ ID NO: 524; 33-41, 43-53, and/or 16-39 of SEQ ID NO: 525; 9-16, and/or 7-18 of SEQ ID NO: 526; 4-11, 24-31, and/or 18-34 of SEQ ID NO: 527; 14-20, 48-56, 62-69, 81-87, and/or 4-56 of SEQ ID NO: 528; 8-16, and/or 13-39 of SEQ ID NO: 529; 11-16, 26-40, 50-63, and/or 6-48 of SEQ ID NO: 530; 23-34, 59-72, and/or 1-28 of SEQ ID NO: 531; 11-16, 26-82, 95-101, 103-113, 120-164, 179-185, 187-194, 224-248, 255-263, 276-293, 296-301, 304-312, 314-320, 351-374, 390-398, 401-407, 420-426, 434-444, 454-475, 481-508, 521-531, 535-549, and/or 46-77 of SEQ ID NO: 532; 6-30, 32-53, 69-76, 78-86, 96-112, 121-135, 142-175, 177-199, 201-255, 263-269, 277-288, 290-303, 307-345, 353-364, 388-403, 443-455, 462-474, 480-485, and/or 6-30 of SEQ ID NO: 533; 12-61, and/or 14-46 of SEQ ID NO: 534; 4-12, 24-33, 39-51, 57-63, 78-87, and/or 26-51 of SEQ ID NO: 535; 8-15, 29-40, 48-54, and/or 33-56 of SEQ ID NO: 536; 22-31, 59-69, and/or 70-100 of SEQ ID NO: 537; 12-61, and/or 12-43 of SEQ ID NO: 538; 4-16, 28-39, 62-71, 85-97, and/or 54-85 of SEQ ID NO: 539; 10-20, 23-31, 35-42, 48-62, and/or 30-53 of SEQ ID NO: 540; 9-41, 46-52, 70-85, and/or 63-89 of SEQ ID NO: 541; 18-34, 36-46, 71-83, 95-101, 130-143, 149-161, and/or 96-115 of SEQ ID NO: 542; 4-18, 26-66, 68-95, 100-110, 120-135, 143-165, 168-175, 177-198, and/or 160-176 of SEQ ID NO: 543; 4-16, 21-34, 51-56, and/or 10-29 of SEQ ID NO: 544; 4-23, 29-37, 40-70, 78-91, 98-111, and/or 89-115 of SEQ ID NO: 545; 4-34, 56-62, and/or 36-54 of SEQ ID NO: 546; 4-9, and/or 1-29 of SEQ ID NO: 547; 10-22, 24-37, 52-57, 74-81, and/or 16-69 of SEQ ID NO: 548; 4-16, 42-70, 78-93, 95-101, 103-111, and/or 64-88 of SEQ ID NO: 549; 4-9, 22-48, 51-59, 64-94, 100-124, 130-135, and/or 123-134 of SEQ ID NO: 550; 10-20, 27-40, 48-57, and/or 15-58 of SEQ ID NO: 551; 24-37, and/or 12-30 of SEQ ID NO: 552; 30-42, 51-56, 67-76, 79-96, and/or 22-61 of SEQ ID NO: 553; 11-22, 28-35, and/or 18-33 of SEQ ID NO: 554; 4-9, 13-21, 37-42, and/or 23-36 of SEQ ID NO: 555; 4-12, and/or 12-22 of SEQ ID NO: 556; 39-50, 71-89, 95-106, 126-139, 154-162, and/or 58-143 of SEQ ID NO: 557; 5-26, 38-46, 54-62, 69-81, 87-99, 103-117, 120-136, 138-161, 168-189, 201-207, and/or 136-167 of SEQ ID NO: 558; 4-21, 33-39, 41-55, 61-68, 73-98, 104-110, 121-127, 131-156, and/or 97-115 of SEQ ID NO: 559; 9-26, 36-48, and/or 21-40 of SEQ ID NO: 560; 4-12, 26-32, and/or 12-24 of SEQ ID NO: 561; 4-12, 17-23, 39-62, and/or 8-34 of SEQ ID NO: 562; 17-41, 47-66, and/or 12-30 of SEQ ID NO: 563; 4-11, 15-25, 33-52, and/or 1-27 of SEQ ID NO: 564; 4-11, 33-40, 48-76, 96-104, and/or 84-106 of SEQ ID NO: 565; 15-22, and/or 11-26 of SEQ ID NO: 566; 8-19, 44-53, 61-71, 78-85, 97-107, and/or 49-89 of SEQ ID NO: 567; 13-23, 31-44, 59-66, 84-90, 96-110, and/or 47-147 of SEQ ID NO: 568; 4-24, 56-73, 83-97, 112-132, 140-150, 161-184, and/or 111-146 of SEQ ID NO: 569; 4-17, 19-26, 41-48, 63-87, 92-99, 113-131, and/or 10-136 of SEQ ID NO: 570; 4-11, 17-26, and/or 6-32 of SEQ ID NO: 571; 26-38, 48-55, 72-86, 90-107, 123-132, 134-161, 181-187, and/or 3-19 of SEQ ID NO: 572; 4-19, 26-35, and/or 11-46 of SEQ ID NO: 573; 5-10, 21-38, 42-70, 84-103, and/or 92-127 of SEQ ID NO: 574; 6-17, 34-40, 42-51, 75-85, 94-100, and/or 38-63 of SEQ ID NO: 575; 6-13, 21-27, 29-35, 57-64, and/or 32-63 of SEQ ID NO: 576; 4-19, 22-48, 54-62, 73-91, 94-109, and/or 75-98 of SEQ ID NO: 577; 9-25, and/or 12-28 of SEQ ID NO: 578; 16-21, and/or 8-25 of SEQ ID NO: 579; 4-24, 26-32, 45-55, 58-67, 76-93, 104-111, 117-122, 128-136, and/or 33-119 of SEQ ID NO: 580; -11, 31-37, 56-63, 66-84, and/or 32-58 of SEQ ID NO: 581; 6-69, 75-87, 89-111, 149-156, and/or 52-139 of SEQ ID NO: 582; 4-13, 19-29, 49-68, and/or 24-49 of SEQ ID NO: 583; 19-25, 27-33, 43-84, 86-92, 111-118, 125-136, 138-147, and/or 95-124 of SEQ ID NO: 584; 20-29, 50-56, 63-85, 89-98, 110-128, and/or 2-29 of SEQ ID NO: 585; 4-11, 41-47, 62-71, and/or 7-34 of SEQ ID NO: 586; 23-30, 48-57, 67-72, 81-89, and/or 11-31 of SEQ ID NO: 587; 14-27, 50-62, and/or 22-57 of SEQ ID NO: 588; 4-17, 23-37, and/or 13-33 of SEQ ID NO: 589; 5-33, 38-57, 60-68, and/or 18-37 of SEQ ID NO: 590; 4-19, 44-51, and/or 24-45 of SEQ ID NO: 591; 17-40, 47-66, 70-78, and/or 67-101 of SEQ ID NO: 592; 4-20, 24-29, 43-55, 57-63, 74-83, 137-157, 171-179, 181-192, 237-243, 273-279, 300-310, 312-321, 324-330, 366-380, 401-417, and/or 61-120 of SEQ ID NO: 593; 6-21, and/or 17-43 of SEQ ID NO: 594; 11-17, and/or 9-31 of SEQ ID NO: 595; 18-28, 38-44, 53-59, 64-74, 78-85, and/or 10-96 of SEQ ID NO: 596; 12-40, 49-58, and/or 5-49 of SEQ ID NO: 597; 28-34, 46-52, 54-68, 72-85, 95-104, and/or 66-94 of SEQ ID NO: 598; 4-14, and/or 1-25 of SEQ ID NO: 599; 4-18, 30-37, 51-65, 83-89, 99-105, 108-136, and/or 24-98 of SEQ ID NO: 600; 26-34, 36-44, 68-78, 85-92, 96-101, 127-134, 141-148, 156-166, 186-192, 244-256, 281-287, 291-301, 308-316, 321-343, 368-382, 385-391, 394-404, 414-429, 453-465, 471-489, and/or 147-240 of SEQ ID NO: 997; 10-18, 26-48, 58-68, 72-78, 94-105, 115-130, 155-164, 170-177, 179-185, 201-219, 243-260, 267-277, 295-302, 350-376, 398-403, 429-437, 451-462, 471-478, 504-512, 563-568, 570-583, 589-594, 614-629, 1-123, and/or 161-546 of SEQ ID NO: 998; 10-20, 35-45, 59-93, 163-168, 190-196, 200-210, 233-261, 270-279, 306-329, 331-353, 363-381, 388-394, 399-425, 443-460, 462-474, 477-498, 506-516, 522-542, 546-559, 570-577, 100-301, and/or 446-518 of SEQ ID NO: 999; 4-13, 28-34, 52-71, 78-90, 118-140, 147-156, 167-187, 264-275, 286-292, 305-310, 328-334, 340-346, 351-362, 31-117, and/or 165-354 of SEQ ID NO: 1000; 38-45, 76-84, 91-103, 111-118, 147-162, 166-177, 187-201, 208-215, 242-249, 267-274, 295-301, 309-322, 18-100, and/or 111-296 of SEQ ID NO: 1001; 4-9, 25-39, 41-47, 70-78, 82-103, 106-140, 152-188, 192-198, 200-207, 211-217, 232-251, 271-277, 285-299, 307-314, 323-335, 344-370, 376-382, 388-398, 417-422, 428-446, 448-456, 462-468, 494-504, 526-533, 565-573, 199-383, and/or 454-579 of SEQ ID NO: 1002; 10-27, 50-87, 94-109, 115-128, 134-152, 155-169, 175-193, 196-213, 216-233, 235-251, 259-270, 272-283, 293-303, 311-318, 327-339, 348-374, 380-386, 392-402, 421-426, 432-450, 452-460, 466-472, 498-508, 530-537, and/or 206-363 of SEQ ID NO: 1003; 9-16, 25-31, 48-86, 90-101, 109-127, 131-147, 150-187, 189-195, 204-211, 213-226, 237-248, 250-261, 271-281, 289-296, 305-317, 326-352, 358-364, 370-380, 399-404, 410-428, 430-438, 444-450, 476-486, 508-515, 547-555, 1-118, 208-283, and/or 494-564 of SEQ ID NO: 1004; 31-37, 57-66, 73-97, 99-117, 119-137, 141-149, 157-172, 179-185, 190-196, 203-212, 216-224, 226-238, 240-251, 261-271, 279-286, 295-307, 316-342, 348-354, 360-370, 389-394, 400-418, 420-428, 434-440, 466-476, 498-505, 537-545, 1-98, 233-351, and/or 423-538 of SEQ ID NO: 1005; 27-37, 44-58, 66-80, and/or 5-70 of SEQ ID NO: 1006; 4-32, 35-69, 92-98, 113-137, 168-190, 224-235, 269-277, 279-289, 322-329, 370-376, 380-387, 389-395, 411-420, 442-457, 463-473, 476-487, 510-521, 531-554, 561-567, 570-585, 604-610, 612-624, 632-651, 660-672, 690-702, 718-730, 738-745, 782-809, 813-820, 823-829, 844-854, 901-906, 911-917, 959-967, 985-991, 997-1006, 1010-1019, 1036-1045, 1053-1059, 1079-1086, 1124-1132, 1137-1150, 1168-1180, 1182-1193, 1209-1214, 1216-1226, 1231-1245, 1271-1277, 1290-1298, 1301-1307, 1339-1345, 22-86, 138-260, and/or 490-641 of SEQ ID NO: 1007; 37-43, 50-57, 65-82, 86-109, 123-129, 141-150, 152-157, 166-172, 179-203, 209-241, 249-296, 298-307, 312-326, 329-335, 341-348, 364-377, 379-399, 401-409, 411-417, 420-425, 438-444, 461-466, 473-480, 497-505, 522-534, 541-550, 586-597, 608-614, 622-632, 660-666, 679-694, 697-706, 708-731, 737-772, 784-789, 810-825, 837-873, 882-895, 901-928, and/or 214-233 of SEQ ID NO: 1008; 10-16, 18-27, 41-61, 81-90, 133-142, and/or 43-118 of SEQ ID NO: 1009; 21-47, 50-69, 83-89, 113-120, 129-146, 152-158, 160-189, 204-225, 235-249, 251-263, 265-275, and/or 107-140 of SEQ ID NO: 1010; 7-12, 16-24, 28-46, 61-68, 79-85, 87-93, 95-102, 108-123, 148-164, 166-172, 177-202, 205-215, 231-246, 254-261, 267-273, 280-294, 309-315, 322-329, 337-342, 345-351, 386-394, 406-413, 449-455, 473-480, 490-497, 501-508, 532-539, 576-583, 623-629, 657-665, 681-708, 715-722, 751-757, and/or 584-613 of SEQ ID NO: 1011; 10-26, 52-88, 94-109, 115-172, 175-189, 196-210, 215-232, 244-252, 260-270, 272-283, 293-303, 311-318, 327-339, 348-374, 380-386, 392-402, 421-426, 432-450, 452-460, 466-472, 498-508, 530-537, 569-577, and/or 258-365 of SEQ ID NO: 1012; 25-46, 59-65, 68-75, 83-90, 93-100, 107-115, 124-135, 151-177, 183-189, 194-206, 209-215, 219-224, 251-263, 267-276, 305-311, 318-327, 332-338, 350-356, 380-396, 406-412, 414-423, 431-437, 453-461, 463-481, 483-491, 505-510, 513-523, 528-545, 568-575, and/or 245-271 of SEQ ID NO: 1013; 4-19, 21-29, 61-68, 87-95, 103-113, 145-154, 157-170, and/or 10-76 of SEQ ID NO: 1014; 4-18, 28-36, 41-65, 69-84, 96-103, 106-115, 118-124, 126-132, 148-156, 169-181, 187-194, 221-227, and/or 1-63 of SEQ ID NO: 1015; 5-33, 67-78, 122-129, 141-150, 172-185, 201-209, 217-223, 235-252, 303-316, 355-368, 383-389, 400-406, 411-420, 426-437, 445-451, 459-467, 479-496, 512-517, 523-530, 535-562, 577-584, 590-605, 610-632, 644-654, 663-669, 680-686, and/or 309-334 of SEQ ID NO: 1016; 31-38, 73-84, 97-121, 124-135, 141-146, 156-170, 174-191, 205-210, and/or 85-153 of SEQ ID NO: 1017; 24-30, 49-69, 71-111, 113-127, 133-145, 153-169, 172-203, 220-236, 247-254, 256-267, 277-287, 295-302, 311-323, 332-345, 348-358, 364-370, 376-386, 405-410, 416-434, 436-444, 450-456, 482-492, 514-521, 548-561, and/or 243-286 of SEQ ID NO: 1018; 4-10, 22-31, 39-53, 85-94, 102-110, 130-137, 143-149, 154-161, 174-179, 184-190, 197-203, 206-212, 220-227, 240-248, 251-265, 267-286, 297-310, 338-357, 365-370, 373-382, and/or 260-345 of SEQ ID NO: 1019; 9-48, 54-71, 84-92, 114-145, 160-188, 190-200, 216-236, 243-255, 261-268, 281-304, 315-322, 330-336, 342-351, 370-380, 383-393, 400-408, 412-420, 436-442, 452-459, 473-480, 501-512, 518-525, 532-541, and/or 1-94 of SEQ ID NO: 1020; 50-59, 66-81, 90-126, 129-185, 187-205, 213-219, 228-240, 254-266, 268-279, 289-299, 307-314, 323-335, 344-370, 376-382, 388-398, 417-422, 428-446, 448-456, 462-468, 494-504, 526-533, 565-573, and/or 275-374 of SEQ ID NO: 1021; 5-14, 61-74, 91-99, 110-116, 119-136, 138-149, 159-169, 188-194, 205-227, 236-244, 249-256, 294-305, 321-342, 350-364, 373-378, 385-392, 404-420, 422-430, 462-470, 491-500, 513-520, 583-591, 617-638, 652-663, 674-680, 684-698, 709-718, 745-753, 757-763, 781-788, 835-841, 844-854, 861-869, 882-890, 898-916, 934-940, 946-952, 979-990, and/or 443-534 of SEQ ID NO: 1022; 23-35, 71-77, 94-100, 134-140, 157-163, 188-212, 214-221, 262-272, 287-293, 323-331, 360-372, 374-380, 402-411, 421-429, 438-443, 462-473, 477-486, 523-528, 530-547, 57-155, and/or 324-404 of SEQ ID NO: 1023; 11-36, 43-59, 62-70, 78-90, 159-165, 176-188, 197-202, 206-213, 220-225, 234-251, 258-275, 286-293, 300-311, 329-337, 352-361, 363-369, 383-396, 399-417, 420-432, 451-466, 472-478, 504-526, 546-552, 558-566, 576-583, 591-609, 621-628, 642-650, 657-663, 676-681, 692-706, 713-724, 734-753, 763-778, 787-807, 819-825, 57-82, and/or 445-461 of SEQ ID NO: 1024; 14-26, 38-46, 50-57, 76-87, 89-104, 107-112, 123-134, 136-142, 148-162, 173-194, 200-206, 208-216, 226-233, 243-256, 264-307, 338-343, 351-359, 366-376, and/or 133-157 of SEQ ID NO: 1025; 13-19, 30-37, 46-60, 75-82, 100-105, 109-115, 134-140, 146-161, 186-192, 199-205, 207-215, 223-230, 254-260, 281-289, 297-311, 344-352, and/or 251-352 of SEQ ID NO: 1026; 5-16, 19-24, 43-54, 56-89, 104-122, 126-139, 144-157, 165-202, 232-244, 252-265, 272-277, 281-287, 289-300, 308-320, 344-355, 364-390, 396-402, 408-418, 437-442, 448-466, 468-476, 482-488, 514-524, 546-553, 585-593, 284-400, and/or 486-600 of SEQ ID NO: 1027; 21-27, 29-46, 50-58, 60-70, 76-98, 100-110, 116-122, 124-130, 145-166, 170-188, 199-209, 214-221, 229-236, 244-259, 270-305, 308-314, 319-329, 348-355, 376-383, 396-442, 446-456, 461-466, 479-485, 513-524, 528-533, 539-546, 556-563, 574-585, 595-602, 604-616, 618-625, 630-647, 649-656, 662-674, 680-686, 689-700, 716-739, and/or 586-630 of SEQ ID NO: 1028; 4-19, 31-49, 82-88, 92-98, 111-141, 146-153, 161-172, 174-197, 199-214, 218-226, 233-239, 242-250, 256-266, 279-293, 298-309, 321-331, 338-345, and/or 223-248 of SEQ ID NO: 1029; 24-41, 54-61, 63-77, 83-91, 100-111, 116-121, 128-133, 139-146, 153-164, 166-176, 212-242, 255-266, 269-275, 277-285, 290-299, and/or 144-277 of SEQ ID NO: 1030; 4-29, 33-47, 93-109, 117-125, 152-168, 175-180, 213-219, 224-234, 261-267, 270-284, 321-326, 328-342, 359-365, 383-389, 401-407, 417-424, 471-478, 491-497, 532-537, 545-555, 569-583, 646-652, 688-694, 711-718, 735-745, 794-803, 813-823, 834-839, 851-857, 860-867, 874-882, 895-900, 902-910, 917-923, 933-940, 948-955, 960-966, 1001-1007, 1045-1053, 1058-1066, 1087-1101, 1103-1114, 1130-1139, 1141-1149, 1155-1166, 1192-1198, 1211-1219, and/or 549-657 of SEQ ID NO: 1031; 13-48, 57-63, 73-81, 89-103, 107-114, 119-125, 130-140, 146-167, 175-186, 202-210, 212-220, 233-239, 255-270, 272-286, 288-301, and/or 10-23 of SEQ ID NO: 1032; 5-41, 48-56, 75-81, 86-93, 100-111, 126-134, 150-156, 168-188, 209-236, 250-257, 260-274, 291-305, 311-335, 337-344, 373-379, 393-406, 423-450, 461-467, and/or 105-135 of SEQ ID NO: 1033; 8-16, 37-88, 105-117, 141-169, 172-178, 189-197, 210-217, 243-249, 253-260, 269-282, 293-299, 315-332, 363-373, 378-401, 406-415, 417-423, 454-460, 465-471, 503-510, 515-521, 538-576, 578-616, 619-625, 636-643, 651-669, 671-686, 691-698, 719-726, 734-748, 762-778, 782-795, 799-810, 821-845, 894-908, 917-925, 937-943, 946-967, 969-975, and/or 444-479 of SEQ ID NO: 1034; 31-45, 47-55, 68-82, 87-100, 103-108, 112-117, 134-140, 157-163, 166-175, 178-185, 197-206, 213-219, 234-244, 265-272, 280-289, 292-305, 312-317, 322-328, 335-344, 349-356, 361-372, 376-383, 399-421, 426-444, 455-475, 490-495, and/or 1-84 of SEQ ID NO: 1035; 4-10, 43-53, 64-100, 116-123, 135-141, 145-154, 164-194, 202-211, 233-242, 250-259, 280-291, 293-314, 318-323, 330-338, 366-379, 381-387, 397-404, and/or 70-188 of SEQ ID NO: 1036; 4-13, 20-28, 33-49, 61-70, 76-94, 100-146, 151-163, 175-182, 202-212, 218-225, 241-252, and/or 12-53 of SEQ ID NO: 1037; 12-46, 49-64, 81-97, 103-108, 119-140, 150-173, 179-193, 196-213, 215-223, 225-235, 238-253, 259-264, 267-274, 278-284, 292-305, 314-321, 340-346, and/or 26-49 of SEQ ID NO: 1038; 18-23, 28-50, 100-150, 157-186, 197-203, 219-231, 233-240, 257-280, and/or 10-45 of SEQ ID NO: 1039; 10-16, 29-49, 59-73, 79-118, 154-169, 178-192, 204-209, 216-224, 231-242, 250-256, 269-275, 290-311, 319-325, 329-339, 354-365, 371-378, 436-444, 476-485, 507-516, 519-525, 540-547, 556-573, 583-591, 598-604, 606-620, 623-629, 638-648, 653-660, 663-684, 699-704, 707-712, 718-747, 759-765, 777-787, 790-797, 802-808, 826-836, 841-853, 868-876, 879-887, 891-898, 909-916, 922-934, 936-947, 972-994, 1022-1029, 1054-1070, 1084-1090, 1104-1115, 1121-1127, 1146-1155, 1157-1174, 1194-1200, 1207-1215, 1233-1253, 1261-1273, 1286-1307, 1333-1341, and/or 1054-1156 of SEQ ID NO: 1040; 14-26, 28-37, 40-49, 58-78, 89-95, 107-118, 125-132, 135-142, 155-161, 175-185, 195-213, 215-225, 233-241, 248-254, 263-271, 294-323, 334-340, 345-351, 355-368, 371-394, 401-410, 419-424, 449-456, 463-469, 483-496, and/or 113-187 of SEQ ID NO: 1041; 10-35, 52-116, 133-143, 149-170, 176-184, and/or 94-134 of SEQ ID NO: 1042; 4-10, 13-19, 31-39, 57-72, 92-103, 109-122, 126-144, 168-174, 179-192, 234-245, 257-262, 36-62, 157-180, and/or 190-270 of SEQ ID NO: 1043; 4-29, 36-52, 60-68, 70-90, and/or 5-73 of SEQ ID NO: 1044; 5-12, 22-56, 58-63, 69-82, 140-146, 175-180, 204-212, 240-248, 276-283, 307-312, 324-329, 335-353, 372-385, 403-412, 436-443, 448-464, 468-474, 476-483, 503-514, 566-573, 590-597, 601-611, 619-626, 630-639, 647-655, 666-679, 689-697, 707-719, 721-728, 761-769, 783-789, 797-803, 806-812, 845-853, 864-870, 893-904, 917-923, 949-956, 967-985, 1005-1021, 1027-1034, 1059-1065, and/or 1-335 of SEQ ID NO: 1045; 4-16, 18-28, 48-55, 67-75, 81-87, 94-100, 108-124, 139-147, 150-156, and/or 110-136 of SEQ ID NO: 1046; 4-22, 28-37, 39-46, and/or 28-38 of SEQ ID NO: 1047; 4-10, 13-19, 27-34, 40-103, 106-113, and/or 79-100 of SEQ ID NO: 1048; 11-23 of SEQ ID NO: 1049; 4-10, 19-25, 45-51, 64-75, 79-89, and/or 73-96 of SEQ ID NO: 1050; 4-22, 29-36, 38-47, and/or 21-44 of SEQ ID NO: 1051; 8-20, 39-44, and/or 26-42 of SEQ ID NO: 1052; 8-19, 31-47, 49-58, 64-79, 84-96, and/or 16-50 of SEQ ID NO: 1053; 20-26, 31-37, and/or 4-13 of SEQ ID NO: 1054; 4-10, 16-32, 34-42, 60-66, and/or 7-25 of SEQ ID NO: 1055; 4-9, 23-45, and/or 8-44 of SEQ ID NO: 1056; 4-19, 34-40, 53-81, 103-117, 122-187, and/or 22-51 of SEQ ID NO: 1057; 4-24, and/or 1-30 of SEQ ID NO: 1058; 2-27 of SEQ ID NO: 1059; 4-18, and/or 9-44 of SEQ ID NO: 1060; 4-17, 19-26, 41-49, 63-87, 92-99, 113-131, and/or 6-105 of SEQ ID NO: 1061; 6-12, and/or 9-32 of SEQ ID NO: 1062; 4-44, 49-62, and/or 22-65 of SEQ ID NO: 1063; 20-28, 34-40, and/or 1-14 of SEQ ID NO: 1064; 4-29, 35-57, and/or 17-43 of SEQ ID NO: 1065; 14-29, and/or 24-35 of SEQ ID NO: 1066; 4-19, 31-47, 62-73, 76-83, 87-93, 99-106, and/or 10-38 of SEQ ID NO: 1067; 4-10, 12-26, and/or 1-28 of SEQ ID NO: 1068; 16-30, 38-45, 55-61, 69-75, 131-141, 159-165, 169-179, 182-191, 206-214, 230-245, 252-262, 272-280, 299-305, 328-339, 362-370, 372-378, 388-393, 401-409, and/or 148-226 of SEQ ID NO: 1203; 13-18, 24-33, 36-49, 69-79, 93-101, 113-119, 129-136, 139-164, 167-175, 182-193, 195-217, 224-231, 282-293, 336-345, 351-358, 373-378, 382-387, 407-415, 441-447, 451-459, 461-470, 479-485, 499-526, 533-544, 559-569, 572-581, 583-592, 598-609, 613-624, 632-649, 654-660, 666-694, 700-706, 712-722, 738-752, 771-778, 800-816, 824-839, 847-864, 879-885, 918-925, 927-946, 957-967, 971-999, 1006-1014, 1018-1037, 1046-1055, 1057-1071, 1090-1098, 1104-1113, 1115-1128, 1181-1187, 1193-1202, 1205-1211, 1223-1234, 1240-1248, 1259-1265, 1273-1281, 1289-1301, 1336-1343, 1346-1352, 1356-1363, 1365-1378, 1382-1391, 1401-1408, 1416-1423, 1433-1443, 1450-1455, 1461-1467, 1475-1481, 1486-1493, 1-14, and/or 1115-1214 of SEQ ID NO: 1204; 6-11, 31-53, 69-84, 86-93, 102-108, 112-121, 135-145, 157-177, 185-202, 208-226, 232-241, 244-251, 260-289, 306-316, and/or 199-267 of SEQ ID NO: 1205; 4-25, 36-41, 44-49, 68-78, 83-89, 95-102, 113-124, 137-142, 163-175, 179-185, 209-218, 233-244, 250-261, 279-288, 308-322, 330-336, and/or 49-119 of SEQ ID NO: 1206; 4-24, 42-50, 57-75, 101-107, 109-131, 153-161, 180-190, 214-223, 226-240, 248-265, 197-220, and/or 252-267 of SEQ ID NO: 1207; 4-24, 56-62, 111-117, 125-130, 138-143, 153-167, 169-175, 195-204, 207-217, 234-250, 284-298, 303-308, 314-326, 351-356, 359-371, and/or 15-111 of SEQ ID NO: 1208; 4-31, 58-64, 74-80, 88-94, 116-127, 131-138, 141-149, 1-63, and/or 105-163 of SEQ ID NO: 1209; 4-9, 15-26, 33-40, 57-68, 91-108, 112-124, 132-152, 158-168, 186-213, 228-236, 253-269, 276-283, and/or 203-222 of SEQ ID NO: 1210; 4-18, 31-48, 50-61, 81-88, 103-110, 114-121, 143-152, 154-164, 176-194, 199-210, 217-225, 234-240, 245-254, 264-279, and/or 138-153 of SEQ ID NO: 1211; 4-20, 35-41, 51-61, 76-88, 107-115, 122-128, and/or 13-108 of SEQ ID NO: 1212; 4-18, 25-31, 41-46, 61-70, 79-85, 126-133, 135-141, 166-172, 175-181, 191-199, 208-217, 250-258, 261-273, 312-320, 370-376, 385-394, 401-409, 411-416, 431-445, 457-478, 531-543, 560-567, 575-593, 607-615, 625-633, 679-689, 733-740, 746-752, 157-219, and/or 432-508 of SEQ ID NO: 1213; 4-28, 47-53, 58-64, 88-97, 124-129, 136-141, 146-167, 174-184, 187-193, 195-203, 205-220, 231-237, and/or 64-92 of SEQ ID NO: 1214; 7-39, 44-56, 60-65, 83-99, 117-132, 142-148, 162-179, 185-203, 213-231, 239-245, 248-259, 288-295, 330-335, 370-381, 391-396, 401-407, 443-462, 472-492, 505-512, 521-530, 549-557, 562-577, 647-653, 660-666, 673-680, 695-703, 710-717, 729-734, 745-751, 756-766, 769-778, 787-794, 812-819, 825-834, 55-76, and/or 667-736 of SEQ ID NO: 1215; 5-11, 21-27, 48-56, 64-73, 75-85, 110-117, 124-130, 132-138, 145-163, 165-171, 186-198, 231-239, 246-254, 265-270, 289-296, 312-322, and/or 100-124 of SEQ ID NO: 1216; 16-24, 26-63, 66-77, 91-97, 100-111, 148-169, 182-188, 205-212, 223-230, 235-244, 264-272, 291-297, 305-312, and/or 252-296 of SEQ ID NO: 1217; 4-17, 19-31, 34-44, 47-59, 87-93, 99-105, 113-119, 124-137, 139-146, 150-163, 165-175, 185-191, 197-214, 222-227, 235-246, 257-270, 274-279, and/or 85-152 of SEQ ID NO: 1218; 4-20, 40-52, 74-81, 110-117, 123-138, 144-150, 163-181, 185-195, 199-232, 234-248, 269-277, 280-286, 301-314, 324-329, and/or 33-55 of SEQ ID NO: 1219; 4-19, 33-55, 67-74, 78-84, 91-105, 109-117, 132-138, 167-176, 190-196, 202-207, 210-217, and/or 151-162 of SEQ ID NO: 1220; 4-14, 20-26, 28-37, 77-84, 89-94, 114-123, 174-180, 200-208, 222-239, 241-251, 263-271, 276-282, 291-302, 330-335, 374-390, 392-400, 432-441, 447-454, 462-467, 487-501, 516-526, 530-537, 550-566, and/or 77-110 of SEQ ID NO: 1221; 16-23, 25-31, 42-48, 57-75, 81-95, 108-118, 124-151, 153-170, 178-185, 190-201, 216-222, 230-260, 290-297, 300-307, 312-318, 326-334, 348-363, 365-385, and/or 89-142 of SEQ ID NO: 1222; 41-50, 52-70, 80-91, 123-131, 136-143, 146-158, 167-178, 207-213, 228-235, 242-264, 274-288, 302-307, 335-347, 349-355, and/or 59-203 of SEQ ID NO: 1223; 5-14, 21-31, 42-71, 76-103, 111-119, 123-132, 138-144, 167-188, 194-200, 205-212, 230-246, 253-260, 263-269, 275-294, 300-319, 330-343, 349-354, and/or 335-347 of SEQ ID NO: 1224; 6-14, 18-57, 67-81, 87-97, 104-109, 115-122, 125-139, 147-156, 178-188, 193-199, 211-216, 221-235, 265-287, 293-300, 312-323, 330-352, 369-379, 385-390, 392-404, 408-420, 437-457, 471-483, 489-494, 501-509, 525-535, 547-554, and/or 410-444 of SEQ ID NO: 1225; 4-18, 55-82, 87-100, 105-117, 145-150, 168-175, 183-189, 198-203, 228-235, 247-256, 277-283, 293-301, 308-321, 337-362, 373-379, 392-397, 427-434, 457-463, 502-510, 539-552, 560-566, 615-629, 99-226, and/or 566-643 of SEQ ID NO: 1226; 4-27, 59-75, 83-88, 95-105, 112-120, 128-144, 164-169, 200-205, 220-226, 237-242, 253-259, 264-270, 1-103, and/or 124-232 of SEQ ID NO: 1227; 12-42, 69-77, 103-109, 120-128, 149-157, 161-166, 179-197, 201-218, 238-248, 253-261, 266-272, 278-286, 307-314, 138-216, and/or 272-287 of SEQ ID NO: 1228; 4-26, 28-43, 50-56, 62-67, 103-109, 121-130, 155-163, 173-179, 197-202, 208-215, 221-233, 258-267, 296-305, 308-314, 321-328, 41-91, and/or 179-200 of SEQ ID NO: 1229; 4-15, 23-32, 48-55, 61-67, 86-98, 102-111, 124-130, 137-157, 166-171, 178-186, 193-200, 218-232, 236-241, 246-264, 274-288, 291-310, 338-346, 348-359, 389-395, 402-414, 416-428, 430-443, 445-451, 455-469, 473-484, 489-499, 501-509, 511-525, 534-542, 556-561, 579-593, 601-621, 625-637, and/or 475-513 of SEQ ID NO: 1230; 23-30, 33-50, 53-59, 106-114, 126-132, 140-146, 171-180, 196-204, 224-240, 242-254, 262-272, 274-282, 288-296, 326-332, 341-352, 378-387, 394-407, 412-418, 431-464, 489-496, and/or 88-176 of SEQ ID NO: 1231; 4-35, 43-52, 60-79, 93-100, 120-139, 146-154, 157-171, 208-226, 234-247, 265-271, 273-283, 292-298, 309-323, 330-339, 355-382, 396-409, 445-453, 455-465, 484-505, 512-525, 528-535, 547-576, 584-594, and/or 488-559 of SEQ ID NO: 1232; 5-28, 34-41, 47-54, 79-100, 112-117, 122-127, 130-139, and/or 43-96 of SEQ ID NO: 1233; 4-23, 25-38, 45-50, 68-77, 105-113, 149-156, 177-188, 197-208, 222-229, and/or 84-145 of SEQ ID NO: 1234; 11-16, 19-32, 37-43, 62-69, 72-80, 82-93, 97-128, 133-142, 156-166, 179-193, 199-205, 209-216, 239-256, 269-278, 295-325, 332-349, 369-379, 6-26, and/or 347-362 of SEQ ID NO: 1235; 4-10, 17-28, 39-48, 67-82, 93-100, 122-128, 144-153, 177-184, 196-208, 263-285, 289-295, 297-310, 353-359, 367-377, 389-409, 413-421, 426-433, 436-442, 445-451, 453-459, 468-475, 477-488, 506-526, 544-554, 562-611, 639-650, 678-692, 697-706, 718-724, 733-744, 746-754, 766-782, 789-796, 808-822, 831-843, 847-856, 861-868, 887-902, 931-937, 939-951, 957-964, 970-976, 997-1003, 1017-1024, 1033-1039, 1048-1054, 1060-1066, 1075-1083, 1092-1130, 1136-1152, 1168-1176, 1210-1221, 1228-1238, 1242-1247, and/or 934-1001 of SEQ ID NO: 1236; 73-86, 88-95, 113-118, 166-178, 223-230, 243-280, and/or 202-216 of SEQ ID NO: 1237; 16-22, 40-46, 51-62, 77-83, 93-106, 116-124, 127-138, 151-158, 162-177, 185-207, 211-220, 223-234, 261-269, 271-280, 309-317, 339-350, and/or 50-127 of SEQ ID NO: 1238; 11-26, 36-42, 74-85, 88-101, 106-121, 137-156, 186-198, 203-224, 226-254, 295-308, 311-318, 327-355, 373-385, 417-443, 445-464, and/or 95-163 of SEQ ID NO: 1239; 5-11, 16-23, 34-43, 48-56, 71-83, 89-96, 101-110, 138-162, 164-180, 189-195, 204-214, 222-227, 229-250, 255-261, 272-278, and/or 19-90 of SEQ ID NO: 1240; 13-19, 26-53, 67-73, 76-82, 87-102, 112-121, 123-148, 151-156, 162-170, 175-186, 199-209, 211-217, 230-244, 251-287, 300-305, 368-374, 403-415, 418-424, and/or 339-446 of SEQ ID NO: 1241; 4-19, 22-30, 59-73, 84-92, 97-117, 128-140, 165-173, 224-234, 245-255, 276-284, 302-309, 323-330, 349-355, 364-376, 380-385, 391-402, 404-415, 424-432, 437-446, 449-477, 484-499, 516-526, 537-544, 550-555, 562-568, 573-601, 616-623, 653-663, 681-718, 720-728, 762-771, 779-799, 801-806, 814-820, 827-835, 851-870, 899-906, 950-957, 973-990, 995-1005, 1036-1052, 1071-1077, 1086-1098, 1147-1152, 1167-1194, and/or 866-789 of SEQ ID NO: 1242; 27-55, 57-64, 66-75, 135-142, 172-178, 191-197, 229-235, 241-246, and/or 184-217 of SEQ ID NO: 1243; 4-24, 33-39, 55-83, 91-114, 126-132, 137-159, 164-189, 202-224, 232-238, 241-253, 259-282, 285-308, 310-335, 359-364, 371-388, and/or 113-128 of SEQ ID NO: 1244; 6-28, 54-59, 103-114, 122-130, 145-153, 167-175, 184-190, 193-204, 207-212, 215-223, 282-289, 291-300, 315-321, 327-339, 347-354, and/or 10-103 of SEQ ID NO: 1245; 14-37, 52-57, 73-85, 96-113, 124-136, 142-148, 150-157, 166-172, 182-194, 199-215, 217-224, and/or 64-160 of SEQ ID NO: 1246; 4-18, 20-33, 59-77, 93-100, 120-129, 131-137, 140-146, 148-158, 166-172, 185-191, 243-249, 253-258, 295-307, 327-333, 345-370, 387-394, 425-432, 483-489, 491-501, 521-527, 538-553, 560-570, 576-582, 629-637, 649-658, and/or 406-431 of SEQ ID NO: 1247; 9-17, 34-39, 41-59, 71-84, 86-98, 148-169, 177-187, 194-203, 207-214, 222-228, 235-258, 265-273, 286-296, 300-307, 316-328, 338-361, 367-375, 394-401, 407-418, 425-434, 480-495, 502-522, 544-560, 568-575, 584-592, 600-622, 636-641, 661-667, 669-690, 700-707, 719-731, 733-739, 745-750, 767-776, 784-791, 795-811, 840-846, 853-866, 664-745, and/or 793-856 of SEQ ID NO: 1248; 19-54, 86-91, 98-105, 109-124, 126-136, 145-150, 173-178, 196-204, 212-224, 229-239, 246-252, 279-299, 307-313, 323-329, 337-345, 349-361, 382-393, 399-406, 416-421, and/or 404-429 of SEQ ID NO: 1249; 20-26, 66-71, 84-97, 105-111, 122-137, 145-165, 170-185, 204-210, 230-242, and/or 64-158 of SEQ ID NO: 1250; 4-16, 28-69, 72-85, 87-99, 101-123, 128-136, 140-159, 161-173, 185-205, 207-220, 227-240, 242-252, 274-280, 290-296, 301-326, 356-379, 399-453, 461-473, 485-498, 501-525, 527-574, and/or 117-132 of SEQ ID NO: 1251; 4-11, 37-52, 56-64, 71-82, 89-96, 108-116, 122-137, 144-162, 165-182, 184-194, 228-237, 252-267, 289-296, 473-487, 489-503, 511-516, 527-545, 553-570, 584-593, 604-611, 629-638, 640-649, 684-696, and/or 536-549 of SEQ ID NO: 1252; 21-37, 81-97, 119-127, 130-143, 158-163, 175-180, 219-230, 245-256, 265-273, 293-299, 319-327, 425-434, 472-485, 493-498, 508-513, 552-557, 562-570, 574-580, 588-594, 597-604, 631-636, 640-646, 667-680, 699-718, 725-747, and/or 168-235 of SEQ ID NO: 1253; 4-11, 19-29, 51-56, 65-73, 85-98, 109-121, 125-135, 145-161, 171-177, 204-219, 223-228, 252-258, 262-268, 286-313, 315-325, 327-332, 345-352, 395-410, 429-435, 443-451, 455-463, 465-475, 481-487, 516-522, 549-562, 585-591, 598-605, 607-614, 643-651, 673-682, 690-696, 700-705, 725-734, 738-744, 758-765, 769-779, 781-792, 830-844, 847-853, and/or 700-722 of SEQ ID NO: 1254; 10-40, 68-91, 95-104, 140-152, 158-170, 185-191, 196-201, 205-219, 240-246, 249-256, 262-268, 274-280, 293-313, 315-320, 326-332, 338-358, 402-453, 457-466, 476-516, and/or 31-94 of SEQ ID NO: 1255; 10-34, 41-47, 50-66, 73-92, 100-107, 121-127, 133-139, 146-155, 159-175, 184-191, 223-230, 238-247, 273-286, 300-310, 328-336, 352-358, 365-372, 376-409, 415-423, 446-452, 459-465, 471-484, 509-522, 532-540, 543-554, 586-598, 600-610, 617-632, 670-689, 695-706, 711-727, 741-746, 752-760, 772-835, 843-882, 890-933, 958-973, 991-1022, 1024-1048, 1053-1070, and/or 277-365 of SEQ ID NO: 1256; 4-31, 56-70, 77-96, 112-117, 124-137, 139-155, 160-169, 176-193, 228-234, 237-257, 271-288, 317-322, 337-371, 373-391, and/or 317-353 of SEQ ID NO: 1257; 4-14, 20-28, 30-52, 54-62, 76-84, 94-100, 125-132, 140-181, 185-191, 208-222, and/or 181-199 of SEQ ID NO: 1258; 9-46, 53-59, 74-80, 82-93, 97-103, 111-117, 130-142, 152-161, 188-197, 236-251, 264-271, 285-295, 307-340, 343-394, 397-412, 416-436, 440-472, 497-527, 540-548, 561-566, 573-583, 591-598, 607-616, 624-631, 639-649, 669-675, 683-689, 694-718, 728-736, 756-771, 782-803, 814-829, 831-871, 873-879, 882-897, 900-912, 920-928, 940-953, 963-998, and/or 243-318 of SEQ ID NO: 1259; 5-16, 24-30, 34-39, 45-51, 59-72, 80-86, 100-108, 116-123, 133-140, 148-162, 176-181, 184-211, 219-228, 233-242, 257-278, 300-310, 320-338, 340-345, 352-360, and/or 226-320 of SEQ ID NO: 1260; 5-12, 51-58, 61-74, 95-112, 124-137, 153-158, 163-189, 192-204, 209-236, 240-250, 255-273, 304-317, 320-326, 334-348, 350-356, 360-378, 384-416, 439-457, 465-470, 488-493, 496-505, 531-541, 548-557, 579-587, 593-601, 616-647, 649-659, 679-685, 693-702, 705-713, 715-734, 737-743, 751-758, 763-779, 781-788, 791-801, 856-862, 882-896, 903-914, and/or 38-55 of SEQ ID NO: 1261; 8-34, 51-57, 68-76, 79-95, 110-116, 127-140, 142-154, 162-172, 174-202, 214-220, 228-239, 292-306, 314-320, 322-329, 337-344, 356-371, 374-380, 382-393, 416-421, 424-433, 444-453, 461-468, 470-478, 485-490, 497-503, 511-519, 537-543, 555-564, 566-579, 588-594, 603-609, 615-627, 634-640, 647-659, 663-689, 699-710, 728-735, 739-748, 750-756, 764-769, 776-788, 418-441, and/or 511-591 of SEQ ID NO: 1262; 12-19, 21-30, 32-39, 43-49, 55-68, 76-87, 97-104, 114-123, 130-141, 153-168, 179-205, 207-216, 218-226, and/or 223-239 of SEQ ID NO: 1263; 8-34, 72-121, 128-141, 153-172, 174-216, 221-256, 261-294, 307-315, 332-349, 354-370, 372-435, 452-457, 461-477, 487-492, 503-509, 511-520, 537-549, 559-565, 568-582, 584-591, 593-602, 607-617, 625-638, 655-674, 681-687, 696-703, and/or 254-268 of SEQ ID NO: 1264; 4-13, 23-40, 79-98, 106-124, 126-149, 154-161, 163-176, 178-187, 199-226, 232-254, 256-276, 297-304, 308-326, 329-338, 364-373, 384-399, 404-432, 439-499, 502-518, 523-544, 557-568, 571-582, 584-590, 603-617, 621-627, 633-639, 641-651, 653-663, 675-684, 686-699, 705-729, 736-781, and/or 522-597 of SEQ ID NO: 1265; 5-45, 49-62, 85-99, 114-122, 136-148, 151-171, 198-211, 253-260, 278-287, 297-303, 309-314, 318-324, 326-336, 348-363, and/or 1-115 of SEQ ID NO: 1266; 5-13, 22-33, 88-95, 132-144, 160-166, 189-202, 210-223, 253-258, 269-282, 286-294, 83-98, and/or 244-269 of SEQ ID NO: 1267; 18-25, 29-38, 72-95, 97-107, 110-139, 144-152, 155-161, 174-182, 198-203, and/or 44-56 of SEQ ID NO: 1268; 5-14, 17-23, 29-50, 52-64, 72-98, 109-115, 120-135, 137-145, 152-158, 167-175, 178-185, 210-234, 241-255, 258-271, 276-281, 290-303, 307-312, and/or 10-34 of SEQ ID NO: 1269; 5-32, 50-56, 62-70, 78-84, 97-121, 132-171, 177-182, 188-195, 204-214, 241-250, 267-274, 276-281, 292-309, 311-320, 333-344, 349-361, 375-395, 398-405, and/or 383-400 of SEQ ID NO: 1270; 4-10, 16-26, 59-80, 82-93, 97-115, 117-131, 148-160, 169-182, 184-210, 217-234, 241-254, 256-263, 265-276, 306-312, 344-350, 384-395, 400-409, 416-423, 428-440, 449-465, 496-504, 517-555, 335-360, and/or 427-541 of SEQ ID NO: 1271; 4-20, 48-91, 96-115, 134-142, 171-187, 197-217, 222-242, 246-255, 264-270, 277-289, 305-320, 338-352, 354-373, and/or 21-130 of SEQ ID NO: 1272;6-23, 25-53, 61-76, 83-92, 107-121, 147-166, 186-201, 207-215, 243-251, 264-274, 282-326, 333-348, 357-366, 371-380, 401-423, 432-465, 471-477, 481-490, 500-506, 512-525, 540-560, 583-603, 605-612, 615-626, 647-656, 661-681, 687-693, 713-722, and/or 587-614 of SEQ ID NO: 1273; 4-9, 15-21, 28-35, 39-54, 59-73, 76-86, 92-108, 120-134, 136-142, 145-161, 209-217, 220-228, 236-249, 258-267, 275-282, 293-304, 306-327, 330-340, 346-352, 354-360, 368-383, 386-392, 401-413, and/or 97-175 of SEQ ID NO: 1274; 4-11, 20-30, 47-66, 72-97, 108-117, 119-129, 142-163, 211-219, 224-237, 243-249, 251-263, 270-288, 295-305, 311-316, 326-333, 341-346, 367-375, and/or 301-378 of SEQ ID NO: 1275; 22-30, 38-45, 62-68, 78-90, 96-103, 107-114, 118-127, 134-148, 150-173, 179-193, 195-200, 205-219, 221-234, 239-248, 250-280, 282-296, 308-325, 334-351, 363-389, 425-432, 438-443, 468-481, 488-495, 499-517, 570-593, 602-610, 613-621, 629-637, and/or 536-559 of SEQ ID NO: 1276; 12-23, 26-35, 51-63, 72-78, 86-91, 135-140, 183-190, 201-209, 211-219, 241-247, 260-266, 272-281, 295-301, 329-335, 339-345, 355-366, 387-402, 428-445, 453-459, 503-517, 519-527, 531-538, 546-553, 560-569, 3-131, and/or 232-331 of SEQ ID NO: 1277; 8-13, 25-35, 51-56, 72-78, 86-91, 135-140, 183-190, 201-209, 211-219, 241-247, 260-265, 272-281, 295-301, 329-335, 339-345, 355-366, 387-402, 428-445, 453-459, 503-512, 519-529, 531-538, 546-553, 560-569, 1-145, 160-183, 212-334, and/or 376-400 of SEQ ID NO: 1278; 5-17, 62-71, 73-116, 118-131, 137-144, 151-158, 160-167, 169-175, 181-190, 193-210, 212-222, 231-262, 273-280, 300-329, 341-358, 363-368, 394-400, 403-409, 416-427, 450-457, 464-470, 478-484, 499-511, 513-529, 544-554, 558-565, 573-589, 597-604, and/or 335-348 of SEQ ID NO: 1279; 4-18, 38-46, 52-60, 65-79, 93-115, 123-131, 144-154, 168-183, 191-196, 201-223, 225-236, 250-263, 273-278, 289-317, 328-338, 357-373, 384-399, and/or 159-248 of SEQ ID NO: 1280; 11-39, 43-52, 57-69, 72-98, 112-142, 147-154, 159-165, 167-178, 198-210, 213-227, 244-250, 257-266, 268-286, 295-301, 305-311, 318-338, 340-346, and/or 262-323 of SEQ ID NO: 1281; 4-9, 17-23, 40-49, 57-70, 72-87, 92-121, 124-133, 135-146, 158-164, 173-195, 204-213, 215-221, 230-246, 250-257, 260-273, 280-298, 304-309, 311-328, 336-343, 362-371, 373-406, 409-418, 433-446, 450-456, 490-496, 503-513, 526-542, 548-563, 569-592, and/or 185-212 of SEQ ID NO: 1282; 4-17, 23-34, 36-44, 53-62, 72-85, 87-92, 110-115, 118-123, 129-150, 155-168, 172-180, 191-197, 205-211, 213-223, 225-233, and/or 176-201 of SEQ ID NO: 1283; 8-26, 33-44, 52-72, 78-96, 145-151, 154-171, 204-212, 223-230, 236-251, 261-272, 280-341, 365-374, 385-394, 417-423, 434-447, 456-486, 494-500, 509-519, 530-546, 556-566, 568-579, 581-603, and/or 300-322 of SEQ ID NO: 1284; 5-11, 14-21, 26-45, 52-67, 71-79, 82-97, 104-144, 151-159, 183-189, 194-205, 211-223, 241-252, 265-273, 275-280, and/or 93-116 of SEQ ID NO: 1285; 13-20, 55-72, 102-109, and/or 10-107 of SEQ ID NO: 1286; 5-14, 16-22, 38-45, 51-59, 61-78, 94-102, 133-142, 153-160, 187-195, 208-221, 240-254, 256-262, 270-275, 281-287, 294-299, 338-354, 356-364, 369-378, 446-452, 506-515, 557-564, 576-599, and/or 132-242 of SEQ ID NO: 1287; 4-29, 41-57, 66-75, 86-93, 96-102, 109-116, 124-131, 164-171, 188-194, 199-208, 214-231, 289-295, 305-310, 314-319, 336-351, 362-368, 389-399, 403-412, 422-433, 435-441, 444-461, 463-469, and/or 250-326 of SEQ ID NO: 1288; 4-16, 46-56, 59-73, 85-94, 97-105, 127-144, 160-166, 188-194, 233-238, 245-250, 270-275, 286-291, and/or 59-76 of SEQ ID NO: 1289; 5-33, 58-64, 78-116, 119-127, 139-160, 171-190, and/or 33-56 of SEQ ID NO: 1290; 6-11, 19-39, 50-56, 60-66, 83-133, 135-167, 195-216, 226-260, 271-319, 327-339, 342-355, 362-368, 373-394, and/or 170-191 of SEQ ID NO: 1291; 4-37, 45-51, 106-119, 132-138, 150-156, 160-171, 176-182, 193-203, 207-215, 222-229, 237-244, 253-261, 296-372, 403-409, 416-422, 440-449, 451-460, 471-485, 504-510, 538-551, 560-569, 573-582, 585-597, 606-617, 632-646, 658-666, 668-676, 685-694, and/or 552-658 of SEQ ID NO: 1292; 16-32, 53-79, 81-96, 102-111, 124-130, 145-152, 159-168, 176-189, 206-231, 236-244, 251-258, 286-292, 304-310, 315-326, 351-361, 383-390, 392-398, 405-411, 430-436, 456-464, 470-480, 482-496, 505-513, 531-540, 546-558, 583-589, 601-607, 621-634, 638-644, 667-673, 681-687, 693-702, 721-733, 737-744, 747-757, 760-767, 772-789, 796-807, 818-823, 846-852, 856-866, 868-880, 882-890, 913-919, 923-929, and/or 14-34 of SEQ ID NO: 1293; 19-42, 55-67, 75-95, 144-156, 168-175, 183-189, and/or 98-109 of SEQ ID NO: 1294; 7-17, 22-27, 34-61, 88-97, 110-117, 152-159, 175-191, 202-213, 220-232, 267-285, 296-315, 341-347, 376-392, 400-408, 421-430, 453-462, 464-470, 478-485, and/or 199-269 of SEQ ID NO: 1295; 27-44, 71-80, 114-123, 127-140, 149-167, 175-188, 191-202, 205-217, 222-227, 270-276, 297-302, 308-318, 324-332, 349-368, 370-376, 382-393, 432-441, 445-459, 472-481, 489-496, and/or 3-25 of SEQ ID NO: 1296; 16-49, 57-63, 84-92, 100-120, 124-130, 160-183, 189-200, 202-209, 236-244, 263-280, 283-334, 341-346, 377-389, 405-423, 452-458, 485-493, 505-513, 518-530, 547-559, 568-579, 595-601, 619-625, 638-649, and/or 474-504 of SEQ ID NO: 1297; 4-18, 21-30, 43-54, 76-83, 85-106, 116-122, 124-160, 180-185, 198-204, 206-222, 230-241, 258-263, 270-302, 325-332, 359-371, 374-386, 391-402, 411-417, 435-443, 458-485, and/or 376-395 of SEQ ID NO: 1298; 17-26, 28-34, 54-62, 83-93, 108-114, 119-125, 151-164, 175-187, 197-222, 224-232, 234-250, 265-270, 276-313, 315-342, 373-383, and/or 132-153 of SEQ ID NO: 1299; 25-42, 47-53, 55-80, 86-113, 116-126, 128-135, 151-159, 167-174, 179-188, 207-221, 226-248, 257-266, 269-279, 297-304, 312-325, and/or 144-155 of SEQ ID NO: 1300; 16-26, 61-71, 75-85, 95-113, 126-163, 175-184, 202-246, 286-291, 293-302, 320-349, and/or 57-76 of SEQ ID NO: 1301; 4-19, 29-36, 48-59, 92-103, 117-139, 154-164, 190-201, and/or 87-113 of SEQ ID NO: 1302; 43-51, 98-108, 123-130, 149-159, 168-179, 182-188, 201-207, 231-240, 334-340, 346-354, 369-378, 462-472, 493-503, 510-518, 520-538, 565-572, 584-590, 592-598, 616-628, 637-646, 659-675, 688-694, 699-705, 724-732, 740-755, 771-780, 792-801, 827-833, 846-856, 873-880, 882-906, 676-694, and/or 855-881 of SEQ ID NO: 1303; 15-45, and/or 29-60 of SEQ ID NO: 1304; 4-11, 15-34, 49-77, 92-121, 128-139, 169-176, 181-210, 216-222, 225-231, 233-246, 248-264, 271-276, 282-306, 319-326, 346-352, and/or 250-277 of SEQ ID NO: 1305; 6-20, 46-54, 64-79, 81-87, 131-138, 156-162, 170-178, 190-198, 226-232, 254-263, 266-274, 293-303, 313-323, 363-369, 419-424, 426-432, 436-455, 507-513, 515-521, 534-547, 553-559, 596-610, 617-636, 638-647, 659-665, 677-683, 691-696, 710-718, 724-730, 750-755, 770-780, 802-808, 824-842, 857-862, and/or 436-529 of SEQ ID NO: 1306; 11-25, and/or 21-35 of SEQ ID NO: 1307; 1-12 of SEQ ID NO: 1308;4-10, and/or 2-11 of SEQ ID NO: 1309; 12-20, and/or 5-14 of SEQ ID NO: 1310; 3-10 of SEQ ID NO: 1311; 4-22, and/or 10-21 of SEQ ID NO: 1312; 4-30, 35-50, and/or 17-32 of SEQ ID NO: 1313; 1-20 of SEQ ID NO: 1314; 16-21, and/or 7-22 of SEQ ID NO: 1315; 5-13, and/or 7-18 of SEQ ID NO: 1316; 10-17, and/or 16-29 of SEQ ID NO: 1317; 17-27, and/or 22-34 of SEQ ID NO: 1318; 12-18, and/or 9-21 of SEQ ID NO: 1319; 4-11, 13-94, 100-111, 115-134, and/or 89-106 of SEQ ID NO: 1320; 4-24, and/or 10-27 of SEQ ID NO: 1321; 4-14, and/or 12-23 of SEQ ID NO: 1322; 18-33, and/or 13-33 of SEQ ID NO: 1323; 16-23, 25-48, and/or 29-40 of SEQ ID NO: 1324; 4-12, 25-64, 68-76, and/or 4-61 of SEQ ID NO: 1325; 4-57, 59-66, 96-104, and/or 76-91 of SEQ ID NO: 1326; 23-43, 45-75, 97-107, 112-121, and/or 26-62 of SEQ ID NO: 1327; 10-24 of SEQ ID NO: 1328; 4-50, and/or 30-44 of SEQ ID NO: 1329; 4-20, 24-43, and/or 10-24 of SEQ ID NO: 1330; 4-49, 56-66, and/or 5-54 of SEQ ID NO: 1331; 33-44, and/or 15-38 of SEQ ID NO: 1332; 4-36, 39-50, and/or 32-47 of SEQ ID NO: 1333; 4-9, 16-30, 32-38, and/or 15-32 of SEQ ID NO: 1334; 4-9, and/or 27-42 of SEQ ID NO: 1335; 4-16, 32-43, 49-58, 64-72, and/or 14-27 of SEQ ID NO: 1336; 12-19, 24-29, 37-43, 47-53, 65-72, 83-95, 112-122, 136-147, 162-168, 174-181, 189-195, 201-208, 216-221, 234-243, 270-276, 278-288, 305-316, 318-342, 350-356, 368-400, 420-428, 434-443, 471-477, 481-488, 530-535, 540-547, 566-575, 591-601, 603-609, and/or 624-629 of SEQ ID NO: 763; 11-22, 28-34, 40-45, 65-86, 99-107, 115-125, 132-141, 143-150, 158-190, 203-211, 216-239, 246-257, 259-270, 272-279, 286-306, 313-332, 338-364, 371-380, 389-397, 410-418, 422-435, 467-510, 515-521, 532-538, and/or 547-563 of SEQ ID NO: 764; 7-20, 28-45, 51-66, 81-104, 108-115, 124-137, 149-155, 161-206, 209-214, 222-239, 250-262, 274-282, 309-343, 351-363, 365-386, 405-413, 435-440, 446-454, 458-466, 470-477, and/or 482-492 of SEQ ID NO: 765; 10-25, 29-35, 39-46, 54-71, 82-88, 102-111, 122-137, 139-145, 152-160, 162-172, 176-182, 193-201, 209-218, 226-232, 242-249, 258-268, 299-314, 318-344, 362-376, 393-399, 405-418, 426-463, 473-485, 487-492, 498-503, 518-544, and/or 561-567 of SEQ ID NO: 766; 16-23, 66-90, 98-110, 125-131, 144-150, 194-200, 213-219, 221-232, 237-256, 263-281, 293-298, 311-318, 326-337, 339-354, 373-389, 396-402, 404-421, 427-439, 441-448, 452-462, 467-479, 508-530, 534-541, 544-550, 562-569, 575-581, 583-592, 595-628, 636-656, 658-672, 674-680, 687-697, 715-721, 731-736, 739-749, 754-761, 771-788, 790-797, and/or 813-824 of SEQ ID NO: 767; 14-42, 51-57, 66-77, 84-96, 103-111, 129-148, 158-193, 198-208, 212-222, and/or 242-262 of SEQ ID NO: 768; 4-23, 29-62, 65-84, 98-104, 128-135, 144-161, 167-173, 175-204, 219-240, 250-264, 266-278, and/or 280-290 of SEQ ID NO: 769; 13-26, 33-45, 50-60, 75-81, 97-105, 123-131, 138-145, 158-166, and/or 168-177 of SEQ ID NO: 770; 6-20, 23-44, 50-61, 67-82, 84-91, 104-125, 133-144, 149-156, 159-166, 173-180, 182-196, 200-206, 224-239, 245-288, 320-339, 342-349, 359-368, 377-385, 411-419, 427-435, 453-474, 481-489, 491-497, 505-514, 516-522, 536-564, 579-586, 618-631, 644-650, 654-661, 663-677, 679-689, 700-705, 710-753, 795-801, 809-814, 821-827, 842-851, 867-905, 920-925, 931-949, 954-961, 1017-1022, 1034-1040, 1047-1057, 1062-1075, 1081-1086, 1107-1117, 1119-1126, 1145-1154, and/or 1162-1172 of SEQ ID NO: 771; 13-21, 47-57, 72-83, 97-102, 105-119, 125-133, 146-153, 170-177, 221-239, 245-273, 283-291, 299-305, 317-329, 335-343, 358-367, 374-380, 399-407, 430-438, 449-454, 473-479, 483-505, 517-527, 531-537, 555-560, 586-599, 601-616, 623-629, 639-647, 649-654, 658-667, 669-676, 690-709, and/or 714-729 of SEQ ID NO: 772; 14-28, 34-40, 45-54, 69-76, 78-83, 86-100, 116-123, 135-143, 146-161, 168-179, 187-200, 204-225, 236-250, 255-265, 271-292, and/or 298-314 of SEQ ID NO: 773; 4-28, 36-42, 78-85, 106-122, 130-136, 144-150, 161-175, 180-190, 194-200, 226-234, 256-265, 274-294, 309-316, 324-333, 336-344, 373-379, 382-389, 398-404, 407-416, 422-446, 451-462, and/or 530-541 of SEQ ID NO: 774; 4-15, 17-42, 71-77, 80-86, 90-116, 123-135, 144-150, 153-163, and/or 183-194 of SEQ ID NO: 775; 7-13, 22-42, 56-62, 84-90, 102-112, 121-133, 140-148, 158-167, 173-181, 192-199, 227-234, 284-293, 301-307, 336-343, 345-353, 366-372, 376-397, 400-436, 439-450, 467-478, 504-510, 519-530, 532-547, 551-558, 564-575, 592-598, 619-630, 636-642, 655-661, 663-669, 671-679, 697-718, 724-736, 738-752, 759-773, 776-788, 805-823, 827-833, 842-852, 859-864, 874-881, 883-889, 905-914, 932-939, 941-957, 963-969, 978-991, 1011-1025, 1052-1062, 1067-1073, 1080-1088, 1106-1112, 1121-1132, and/or 1139-1152 of SEQ ID NO: 776; 9-23, 32-38, 44-54, 64-71, 95-126, 146-154, 163-173, 190-196, 199-206, 249-256, 262-277, 291-302, 350-356, 380-398, 406-413, 420-430, 433-444, 471-478, and/or 492-507 of SEQ ID NO: 777; 5-26, 57-66, 68-74, 81-87, 105-116, 122-132, 144-160, 185-212, 217-223, 228-234, 241-252, 269-274, 291-313, 318-328, 335-342, 368-375, 397-404, 411-422, 431-439, 462-472, 474-485, 493-499, 509-519, 521-527, 530-558, 563-579, and/or 590-602 of SEQ ID NO: 778; 9-23, 32-38, 44-54, 64-71, 95-126, 146-154, 163-173, 190-196, 199-206, 249-256, 262-277, 291-302, 350-356, 380-398, 406-413, 420-430, 433-444, 471-478, and/or 492-507 of SEQ ID NO: 779; 18-31, 34-53, 57-67, 74-81, 90-106, 136-144, 147-153, 157-163, 170-182, 192-207, 233-241, 245-251, 256-267, 274-281, 284-306, 318-330, 333-340, 345-351, 356-379, 388-404, 428-439, 455-466, 468-480, 488-505, 515-526, 553-564, 571-577, 594-600, 607-614, 616-628, 634-642, 644-651, 655-666, 672-678, 686-703, 732-738, 745-751, 755-768, 772-778, 785-805, 807-814, 817-825, 831-853, 858-868, 890-905, 918-926, 934-942, 957-970, 972-981, 990-1001, 1057-1067, 1069-1077, 1089-1109, 1116-1130, 1133-1141, 1154-1165, 1190-1206, 1208-1215, 1217-1225, 1228-1254, 1256-1263, 1271-1279, 1283-1305, 1333-1339, 1357-1367, 1373-1379, 1388-1405, 1432-1442, 1444-1451, 1453-1461, 1463-1479, 1488-1504, 1516-1524, 1532-1540, 1555-1568, 1589-1600, 1607-1613, 1633-1638, 1655-1665, 1687-1704, 1721-1728, 1731-1737, 1744-1763, 1793-1804, 1816-1823, 1833-1850, 1855-1865, 1868-1875, 1886-1902, 1916-1925, 1931-1937, 1954-1967, 1971-1977, 1987-2002, 2009-2015, 2030-2036, 2043-2049, 2053-2077, 2085-2098, 2114-2122, 2129-2136, 2154-2167, 2187-2203, 2232-2243, 2253-2274, 2286-2303, 2311-2323, 2344-2365, 2371-2378, 2388-2404, 2406-2413, 2415-2424, 2426-2450, 2454-2461, 2469-2475, and/or 2486-2505 of SEQ ID NO: 780; 4-22, 24-30, 33-39, 60-72, 83-89, 128-137, 153-161, 165-174, 186-194, 212-218, 251-260, 275-284, 288-297, 309-318, 335-341, 374-383, 399-407, 411-420, 432-440, 467-482, 518-526, 572-579, 595-609, 649-663, 680-686, 691-702, and/or 708-714 of SEQ ID NO: 781; 11-25, 39-57, 69-94, 100-107, 118-155, 158-171, 189-201, 226-233, 236-245, 249-262, 287-296, 298-312, 315-329, 333-342, 351-359, 364-374, 382-388, 399-407, 411-417, 419-449, 454-471, 486-492, 494-504, 515-541, 547-552, 582-600, 611-623, 625-641, 651-657, 678-692, 699-709, 713-720, 746-752, 772-781, 791-804, 829-844, 880-893, 900-910, 915-923, 936-942, and/or 953-970 of SEQ ID NO: 782; 5-11, 17-24, 26-32, 36-43, 50-61, 67-73, 91-102, 111-126, 133-148, 154-161, 167-173, 179-195, 208-223, 230-240, 242-253, 270-286, 292-306, 308-347, 352-371, 373-380, 386-395, 404-410, 418-433, 436-444, 447-460, 463-477, 486-492, 522-533, and/or 548-553 of SEQ ID NO: 783; 4-12, 15-27, 35-55, 68-95, 100-109, 117-122, 129-135, and/or 157-162 of SEQ ID NO: 784; 25-46, 59-65, 68-75, 83-90, 93-100, 107-115, 124-135, 151-177, 183-189, 194-206, 209-215, 219-224, 251-263, 267-276, 305-311, 318-327, 332-338, 350-356, 380-396, 406-412, 414-423, 431-437, 453-461, 463-481, 483-491, 505-510, 513-523, 528-545, and/or 568-575 of SEQ ID NO: 785; 10-35, 42-59, 65-70, 76-85, 92-104, 149-155, 184-191, 234-243, 248-259, 268-277, 279-287, 391-398, 410-430, 445-454, 488-494, 498-504, 518-523, 530-538, 574-590, 615-623, 627-633, 652-660, 662-670, 674-683, 703-714, 720-728, 731-737, and/or 751-757 of SEQ ID NO: 786; 5-12, 39-51, 57-64, 67-84, 86-108, 124-130, 139-159, 167-179, 181-202, and/or 226-235 of SEQ ID NO: 787; 12-20, 29-40, 57-77, 79-88, 97-103, 111-117, 119-137, 174-200, 202-218, 221-229, 231-238, 240-246, 254-264, 266-280, 296-308, and/or 321-331 of SEQ ID NO: 788; 4-18, 20-48, 54-68, 80-105, 110-117, 120-130, 132-167, 179-214, 227-246, 259-295, 306-323, 332-339, 345-351, 357-363, 366-374, and/or 379-392 of SEQ ID NO: 789; 8-21, 23-31, 53-66, 69-94, 99-113, 119-184, 190-214, 233-244, 268-274, 279-284, 289-298, 300-311, 315-337, 344-350, 364-383, and/or 385-397 of SEQ ID NO: 790; 26-38, 43-63, 67-76, 79-98, 105-112, 115-121, 132-144, 148-153, 179-184, 194-203, 239-245, 261-278, and/or 282-315 of SEQ ID NO: 791; 13-22, 24-30, 49-61, 65-72, 90-97, 99-105, 115-131, 152-160, 165-171, 176-188, 202-221, 231-250, 255-274, 280-286, 288-296, 331-337, 339-347, 350-358, 374-385, 391-408, 418-427, 438-453, 468-476, 482-490, 497-506, 526-532, 534-583, 696-702, 713-719, 730-748, 750-758, 762-778, 802-808, 825-857, 864-950, 963-1004, 1015-1023, and/or 1046-1058 of SEQ ID NO: 792; 4-10, 22-28, 35-44, 58-66, 74-84, 86-98, 116-131, 138-143, 181-186, 224-230, 241-253, 282-292, 305-313, 325-331, 333-341, 348-360, 384-391, 395-408, 415-429, 431-445, 525-531, 558-564, 567-584, 601-612, 624-637, 645-652, 682-687, and/or 700-706 of SEQ ID NO: 793; 4-13, 19-27, 33-40, 57-82, 107-115, 117-125, 162-173, 197-206, 215-226, 256-266, 291-298, 303-310, 318-323, 331-336, 345-360, 379-396, 405-410, 426-434, 454-462, 468-476, 482-497, 512-518, 529-541, 556-564, 570-581, 589-594, 601-610, 629-637, 639-648, 663-670, 704-711, 725-738, 746-768, 770-780, 787-804, 817-823, 830-837, 876-882, 930-936, and/or 939-968 of SEQ ID NO: 794; 5-13, 20-65, 67-74, 107-115, 128-169, 171-195, 238-244, 256-287, and/or 292-298 of SEQ ID NO: 795; 7-13, 16-77, 89-96, 104-114, 117-125, 148-160, 167-191, 193-202, and/or 227-236 of SEQ ID NO: 796; 21-36, 41-47, 54-89, 122-129, 138-165, 173-190, 196-216, and/or 221-229 of SEQ ID NO: 797; 8-45, 135-140, 172-182, 189-196, 206-216, 218-235, 260-269, 272-278, 307-313, 333-344, 352-359, 371-395, 403-414, 416-422, 426-438, 451-470, 478-484, 493-502, 504-511, and/or 514-533 of SEQ ID NO: 798; 6-25, 49-59, 65-96, 107-115, 117-124, 135-151, 176-185, and/or 203-209 of SEQ ID NO: 799; 5-15, 46-56, 58-81, 83-111, 118-138, 152-160, and/or 165-175 of SEQ ID NO: 800; 7-16, 18-24, 36-43, 54-60, 65-73, 88-94, 107-113, 122-128, 134-141, 162-171, 182-216, 218-235, 249-263, 266-278, 290-301, and/or 308-338 of SEQ ID NO: 801; 4-14, 19-24, 27-36, 38-51, 63-73, 90-96, 102-121, 138-150, 157-174, 176-202, 212-225, 229-245, 250-258, 261-268, 279-291, 293-310, 319-338, 358-368, 371-389, 393-398, 404-413, 416-433, 435-442, and/or 458-471 of SEQ ID NO: 802; 17-40, 47-82, 85-93, 101-113, 153-172, 180-186, 190-208, 215-224, 252-261, 269-279, 283-289, 294-306, 311-328, 397-408, 416-423, 425-437, 492-499, 513-534, 542-548, and/or 550-555 of SEQ ID NO: 803; 8-17, 29-43, 45-52, 58-69, 87-100, 102-112, 148-163, 172-187, 190-208, 210-227, 232-239, 245-253, 258-263, 286-299, 313-334, 346-362, 373-388, 391-410, 417-423, 425-430, 434-446, 457-472, 483-489, 496-502, 518-524, 537-546, 555-560, 602-610, 637-646, 676-689, 698-704, 706-742, 750-778, 780-791, 806-842, 864-879, 881-888, 890-899, 901-908, 910-921, 941-947, 953-959, 967-980, 990-995, 1000-1061, 1073-1079, 1081-1092, 1096-1118, 1121-1168, 1174-1185, 1195-1209, 1219-1232, 1237-1243, 1250-1274, 1276-1286, 1302-1319, 1324-1333, 1339-1344, 1349-1361, 1370-1376, 1418-1427, 1435-1449, 1453-1469, 1473-1478, 1482-1495, 1509-1517, and/or 1519-1526 of SEQ ID NO: 804; 4-14, 16-32, 42-47, 65-71, 82-109, 128-145, 158-171, 177-191, 197-228, and/or 230-236 of SEQ ID NO: 805; 16-22, 26-42, 52-72, 75-89, 97-102, 114-147, 154-160, 165-170, 172-200, 202-229, 231-244, 256-261, 267-278, 286-294, 312-319, 330-336, 340-346, 360-373, 375-383, 386-396, 420-441, 443-474, 484-491, 496-517, 535-574, 600-606, 608-624, 636-643, 646-658, 664-687, 692-703, 716-725, 733-750, and/or 755-764 of SEQ ID NO: 806; 4-14, 24-34, 47-69, 81-90, 98-112, 144-153, 161-169, 189-196, 202-208, 213-220, 243-249, 256-262, 265-271, 279-286, 299-307, 310-324, 326-345, 356-369, 397-416, 424-429, and/or 432-441 of SEQ ID NO: 807; 4-9, 14-23, 50-56, 59-68, 77-102, 111-120, 126-152, 161-167, 174-180, 189-202, 204-228, 237-245, 259-266, 278-285, and/or 300-309 of SEQ ID NO: 808; 23-35, 71-77, 94-100, 134-140, 157-163, 189-195, 211-219, 221-231, 238-244, 246-253, 263-277, 298-306, 315-321, 337-342, 350-355, 369-377, 389-400, 408-416, 422-427, 441-449, 465-477, 481-488, 527-532, and/or 534-551 of SEQ ID NO: 809; 14-20, 35-48, 53-63, 71-77, 95-101, 114-121, 123-133, 144-151, 153-160, 162-170, 190-197, and/or 201-211 of SEQ ID NO: 810; 9-17, 26-46, 65-72, and/or 90-101 of SEQ ID NO: 811; 21-39, 46-53, 68-96, 107-113, 118-124, 126-135, 158-185, 196-202, 204-213, 219-226, 246-253, 267-275, 277-285, 299-317, 319-338, 404-410, 421-428, and/or 435-463 of SEQ ID NO: 812; 17-24, 29-40, and/or 47-56 of SEQ ID NO: 813; 17-25, 32-77, 82-91, 100-128, 161-169, 194-207, 211-218, 227-232, 239-245, 255-260, 278-300, 311-325, 342-356, 382-390, 393-401, 416-460, 467-487, 491-503, 505-512, 516-532, 551-565, 568-575, 594-601, 610-632, 638-643, 647-670, 672-685, 699-710, and/or 712-726 of SEQ ID NO: 814; 5-14, 25-46, 49-55, 59-65, 77-85, 98-107, 125-169, 181-186, 223-240, 271-281, 290-300, 306-313, 315-322, 330-337, 348-359, 370-377, 384-392, 416-424, 428-445, 456-469, 479-486, 502-510, 518-523, 525-535, 555-575, 578-585, 605-612, 624-637, 661-685, 693-700, 708-721, 723-729, 744-754, and/or 770-775 of SEQ ID NO: 815; 4-33, 38-52, 92-106, 116-124, 133-138, 142-148, 153-159, 161-168, 245-257, 282-287, 314-321, 331-336, 355-361, 366-372, 374-390, 396-409, 447-455, 484-490, 498-504, 511-519, 531-538, 540-545, 574-581, 586-596, 625-631, 644-655, 668-674, 685-692, 718-723, 728-741, 771-778, 787-797, 801-807, 819-828, and/or 832-844 of SEQ ID NO: 816; 5-25, 31-39, 72-79, 93-102, 104-110, 122-132, 138-146, 157-189, 192-198, 205-214, 226-233, 240-248, 269-275, 282-298, 304-310, 313-327, and/or 342-348 of SEQ ID NO: 817; 12-39, 49-55, 59-69, 95-104, 106-111, 116-128, 161-184, 186-217, 229-237, 240-252, 254-269, 271-278, 311-326, 331-338, 348-356, 364-370, 375-408, 429-460, 471-482, 484-500, 508-516, 527-536, 539-548, 560-576, 583-605, 643-655, 662-676, 682-687, 691-697, 703-715, 726-734, 737-746, 757-768, 778-789, 791-814, 821-826, 834-854, 890-899, 914-925, 947-954, 959-967, 984-990, 993-1000, 1012-1021, 1039-1044, 1065-1070, 1081-1098, 1136-1142, 1149-1157, 1165-1170, 1175-1186, 1191-1201, 1225-1265, 1276-1285, 1292-1300, 1323-1333, 1351-1361, 1366-1372, 1383-1397, 1404-1412, 1417-1425, 1431-1448, 1468-1473, 1483-1494, 1496-1504, and/or 1506-1530 of SEQ ID NO: 818; 18-53, 64-93, 95-105, 124-135, 143-148, 155-161, 163-171, 184-198, 238-245, 258-271, 273-284, 287-292, 302-310, 312-320, 322-341, 349-365, 377-403, 407-414, 417-423, 444-453, 455-469, 471-495, 503-511, 536-557, 579-586, 588-609, 619-626, 632-638, 643-649, 656-663, 669-680, 682-688, 699-714, 729-739, 755-761, 768-776, 781-793, 801-815, 821-826, 833-842, and/or 863-869 of SEQ ID NO: 819; 8-15, 24-40, 51-65, 78-89, 102-111, 117-154, 164-177, 181-192, 198-209, 216-222, 230-237, 241-248, 254-268, 285-293, 298-321, 331-338, 366-373, 384-389, 392-415, 429-439, 441-451, 453-459, 471-486, 489-501, and/or 524-535 of SEQ ID NO: 820; 10-18, 26-38, 48-54, 60-69, 77-83, 88-95, 119-126, 133-169, 172-185, 193-206, 214-225, 236-250, 269-275, 278-301, 320-329, 336-341, 347-353, 356-369, and/or 389-396 of SEQ ID NO: 821; 27-32, 37-50, 68-82, 84-108, 134-145, 149-154, 162-170, 172-182, 194-200, 205-224, 232-270, 293-299, and/or 312-328 of SEQ ID NO: 822; 8-14, 19-45, 65-75, 82-87, 95-105, 135-149, 154-160, 175-184, 205-226, 229-244, 249-256, 284-296, 298-304, and/or 321-348 of SEQ ID NO: 823; 4-10, 15-24, 26-53, 55-71, 78-83, 90-112, 128-148, 156-163, 165-179, 203-213, 228-239, 250-259, 277-285, 292-314, 322-330, 335-340, 345-360, 363-370, 381-396, 404-409, and/or 416-427 of SEQ ID NO: 824; 20-32, 37-46, 53-65, 75-83, 86-95, 99-105, 121-133, 139-151, 183-190, 199-205, and/or 216-227 of SEQ ID NO: 825; 9-25, 29-48, 50-100, 102-126, 131-149, 167-173, 210-217, 224-256, 259-265, 275-292, 295-301, 308-313, 319-335, 337-346, 352-359, 362-382, 393-423, 436-449, 468-476, 481-487, 492-500, 526-534, 537-548, 560-567, 569-579, 590-598, 604-613, 629-636, and/or 644-656 of SEQ ID NO: 826; 4-18, 25-31, 33-39, 42-53, 64-92, 97-111, 123-129, 134-146, 165-171, 173-190, 192-213, 226-239, 251-273, 283-298, 316-324, 339-345, 350-356, 361-376, 400-408, 418-440, 444-451, 476-481, 503-516, 524-542, 555-563, 581-594, 607-629, 634-641, 647-670, 711-719, 728-738, 755-765, 772-780, 800-815, 822-833, 842-852, 860-865, 874-880, 891-913, 926-938, 941-946, 961-978, 984-990, 1014-1024, 1038-1044, 1052-1092, 1099-1111, 1120-1140, 1153-1168, 1170-1190, 1193-1210, 1221-1233, 1253-1264, 1268-1274, 1283-1289, 1295-1300, 1303-1327, 1338-1351, 1362-1368, 1391-1396, 1410-1416, 1429-1441, 1471-1477, 1483-1513, 1526-1555, 1585-1591, 1596-1630, and/or 1632-1639 of SEQ ID NO: 827; 10-25, 34-54, 57-67, 77-96, 111-121, 127-139, 151-157, 161-179, 183-198, 201-219, 233-239, 247-252, 268-276, 283-294, 299-309, and/or 319-324 of SEQ ID NO: 828; 7-15, 20-32, 85-97, 102-109, 117-133, 137-161, 176-184, 186-203, 213-225, 227-251, 258-274, 280-290, 319-325, 335-364, 377-387, 403-410, 412-421, 436-454, 458-475, 478-504, 512-521, 541-567, 601-609, 614-622, 635-651, 657-669, 687-694, 702-708, 717-733, 735-741, 766-786, 788-800, 813-818, and/or 823-834 of SEQ ID NO: 829; 4-38, 49-69, 75-85, 110-115, 127-134, 167-173, 203-211, 240-245, 258-264, 293-299, 301-316, 348-354, 356-362, 386-391, 405-410, 456-462, 474-483, 494-499, 511-516, 523-528, 533-538, 549-557, 579-585, 587-593, 607-612, 618-625, 627-634, 654-660, 664-670, 682-688, 697-702, 729-736, 749-756, 783-793, 804-812, 817-829, 862-868, 915-920, 944-950, 954-960, 1000-1031, 1044-1056, 1069-1077, 1079-1084, 1097-1118, 1139-1146, 1152-1158, 1165-1176, 1181-1186, 1201-1213, 1257-1263, 1268-1276, 1278-1285, 1354-1360, 1369-1378, 1386-1396, 1439-1446, 1491-1501, 1526-1548, and/or 1556-1564 of SEQ ID NO: 830; 4-13, 20-34, 47-53, 58-65, 76-82, 89-106, 139-160, 165-182, and/or 191-205 of SEQ ID NO: 831; 20-40, 42-49, 58-67, 71-80, 95-100, 116-122, 131-142, 145-152, 158-173, 179-186, 196-202, 229-241, 258-270, 289-300, 302-320, 345-351, 370-382, 391-404, 455-464, 504-514, and/or 516-527 of SEQ ID NO: 832; 5-14, 26-35, 38-45, 54-60, 63-79, 121-127, 137-145, 152-162, 167-173, 175-183, 191-202, 218-228, 238-263, 278-295, 303-316, 320-335, 337-345, 359-365, and/or 382-400 of SEQ ID NO: 833; 4-17, 31-38, 46-61, 68-73, 76-97, 128-139, 150-156, 166-172, 174-182, 184-212, 219-225, 238-245, and/or 249-262 of SEQ ID NO: 834; 4-24, 31-42, 45-54, 59-71, 83-92, 108-115, 123-130, 149-156, 202-208, and/or 224-233 of SEQ ID NO: 835; 4-16, 25-41, 44-52, 60-66, 73-82, 92-101, 108-114, 133-138, 145-155, 177-185, and/or 194-202 of SEQ ID NO: 836; 4-9, 21-39, 72-78, 82-88, 99-131, 136-143, 151-162, 164-187, 189-204, 208-216, 223-229, 232-240, 246-256, 269-283, 288-299, 311-321, and/or 328-335 of SEQ ID NO: 837; 26-33, 39-45, 50-62, 79-85, 87-101, 116-131, 142-152, 154-186, 193-199, 201-216, 221-243, 266-272, 281-297, 324-330, 335-342, 345-355, 375-383, and/or 407-413 of SEQ ID NO: 838; 4-22, 27-36, 60-69, 90-98, 107-113, 117-123, 127-134, 137-151, 154-161, 169-178, 185-192, 202-208, 214-223, 230-239, 245-255, 266-275, 307-317, 323-337, 339-353, 361-379, 385-391, 393-401, 415-422, 424-429, 434-442, 444-449, and/or 470-480 of SEQ ID NO: 839; 4-22, 29-34, 37-44, 53-80, 98-110, 127-142, 144-156, and/or 158-165 of SEQ ID NO: 840; 4-12, 14-20, 27-34, 39-47, 51-67, 69-81, 89-97, 105-119, 121-133, 140-149, and/or 151-161 of SEQ ID NO: 841; 17-24, 34-40, 78-85, 227-233, 294-315, 327-335, 345-351, 354-359, 363-368, 388-403, 405-411, 413-419, 425-434, 462-472, 480-500, 528-536, 542-560, 566-573, 579-589, 593-606, 614-646, 651-658, 663-669, 686-726, 734-747, 754-778, 787-806, 809-825, 827-839, and/or 876-887 of SEQ ID NO: 842; 9-29, 35-40, 49-63, 69-76, 110-134, 141-147, and/or 160-169 of SEQ ID NO: 843; 6-31, 33-47, 53-59, 62-78, 93-98, 105-114, 121-130, 136-169, 172-195, 197-208, 223-228, 236-267, 277-283, 295-307, 309-325, 330-339, 345-352, 358-370, 379-391, 419-450, 461-508, 510-519, 521-539, 547-575, 578-587, 589-603, 612-633, 644-657, 666-678, 694-706, 711-717, 728-742, 759-769, 777-784, 800-806, 820-838, 841-848, 851-856, 870-876, 887-895, 908-914, 923-940, 942-953, and/or 969-988 of SEQ ID NO: 844; 12-39, 41-50, 68-74, 87-97, 113-136, 141-156, 167-180, 190-196, 204-223, 229-235, and/or 247-278 of SEQ ID NO: 845; 10-16, 25-53, and/or 64-74 of SEQ ID NO: 846; 5-43, 46-81, 88-96, 137-142, 163-191, 195-203, 210-235, 241-254, 256-276, 280-288, 292-305, 307-313, 317-333, 335-343, 347-353, 357-363, 372-381, 384-389, and/or 399-409 of SEQ ID NO: 847; 8-14, 22-32, 35-46, 57-75, 83-91, 100-106, 108-114, 125-131, 133-142, 157-175, 186-211, 217-235, 246-361, 367-372, 382-394, 396-405, 414-438, 459-471, 504-510, 513-535, and/or 538-560 of SEQ ID NO: 848; 8-20, 25-30, 46-62, 67-73, 98-103, 105-114, 119-141, 144-153, 168-178, 181-193, 198-204, 208-227, 236-242, 249-258, 281-288, 291-306, 327-336, 340-361, 368-380, 389-409, 417-426, 428-435, 442-453, 468-486, 488-496, 498-509, 511-523, 540-553, 566-579, 587-603, 629-636, and/or 677-682 of SEQ ID NO: 849; 9-25, 41-61, 68-75, 81-102, 106-141, 158-165, and/or 172-191 of SEQ ID NO: 850; 7-38, 43-58, 67-79, 92-99, 103-111, 118-128, 130-139, 152-165, 170-186, 192-223, and/or 225-251 of SEQ ID NO: 851; 4-16, 21-36, 38-47, 54-64, 92-103, 117-126, 135-155, 157-200, 202-223, 231-239, and/or 246-262 of SEQ ID NO: 852; 6-38, 44-57, 62-75, 82-96, 104-109, 115-122, 129-136, 147-160, 185-193, 200-206, 230-245, 248-269, 274-282, 289-298, 306-314, 321-335, 344-362, 372-377, 385-394, 422-431, 438-447, 479-505, 529-541, 547-558, 564-571, 573-579, 606-612, 621-632, 638-649, 656-664, 676-683, 695-704, 711-716, 728-734, 736-742, 776-781, 783-791, 809-816, 850-856, 866-872, 889-898, 906-912, 919-926, 944-953, 987-992, 1015-1022, 1024-1038, 1066-1072, 1097-1105, 1113-1119, 1121-1136, and/or 1147-1154 of SEQ ID NO: 853; 5-14, 27-42, 48-67, 71-83, 85-91, 105-112, 114-135, 139-147, 159-165, 169-185, 188-195, 199-208, 212-221, 231-253, 264-272, 275-282, 290-303, 309-319, 324-331, 340-358, 380-405, 419-425, 438-444, 450-463, 468-477, 497-514, 520-533, 549-556, 568-574, 617-626, 637-643, 661-668, 674-684, 705-713, 718-733, and/or 735-769 of SEQ ID NO: 854; 5-16, 29-53, 63-71, 74-93, 124-132, 140-192, 199-216, 227-258, 260-268, 272-282, 285-300, 323-331, 353-368, 389-396, 414-421, 429-441, 448-454, 459-467, 474-493, 501-508, 516-575, 593-612, 631-661, 665-693, 715-724, 736-751, 754-765, 771-777, 782-791, 809-820, and/or 823-853 of SEQ ID NO: 855; 51-70, 81-95, 103-110, 117-123, 130-136, 142-160, 174-180, 199-207, 268-274, 280-296, 347-358, 361-369, 390-396, 401-409, 424-430, 442-448, 455-467, 501-508, 523-533, and/or 553-560 of SEQ ID NO: 856; 4-10, 35-45, 56-92, 108-116, 127-133, 137-146, 156-186, 194-203, 225-234, 242-251, 272-283, 285-306, 310-315, 322-330, 358-371, 373-379, and/or 389-396 of SEQ ID NO: 857; 4-32, 38-46, 66-83, 88-95, 110-118, 123-141, 169-180, 200-208, 217-225, 237-245, 247-261, 263-272, 275-282, 291-302, 310-338, 345-353, 360-369, 371-378, 386-394, 398-413, 416-422, and/or 437-448 of SEQ ID NO: 858; 4-11, 18-26, 31-47, 59-68, 74-92, 98-144, 149-158, 173-180, 200-210, 216-223, and/or 239-250 of SEQ ID NO: 859; 4-10, 29-56, 93-99, 119-124, 133-140, 159-171, 187-195, 200-214, 221-233, 249-255, 263-271, 285-291, and/or 310-316 of SEQ ID NO: 860; 29-35, 68-85, 92-99, 107-122, 124-135, 138-144, 146-158, 173-205, 208-227, 232-259, 277-285, 317-324, and/or 326-333 of SEQ ID NO: 861; 9-18, 21-27, 42-49, 58-75, 85-93, 100-106, 108-122, 125-131, 140-150, 155-162, 165-186, 201-206, 209-214, 220-249, 261-267, 279-289, 292-299, 304-310, 328-338, 343-355, 370-378, 381-389, 393-400, 411-418, 424-436, 438-449, 474-496, 524-531, 556-572, 586-592, 606-617, 623-629, 648-657, 659-676, 696-702, 709-717, 735-755, 763-775, 788-809, and/or 835-843 of SEQ ID NO: 862; 20-32, 52-63, 75-88, 96-101, 116-154, 164-173, 187-199, 202-240, 253-279, 285-298, 305-318, and/or 324-339 of SEQ ID NO: 863; 4-22, 24-29, 36-43, 63-75, 90-96, 118-128, 137-145, 168-182, 200-210, 212-221, 242-250, 289-316, 318-323, 327-339, 381-387, 401-411, 424-434, 443-449, 453-465, 485-498, 500-508, 510-515, 521-528, 538-545, 554-560, 574-606, 619-627, 645-658, and/or 681-688 of SEQ ID NO: 864; 8-18, 45-50, 52-62, 76-82, 84-107, 109-116, 130-137, 141-150, 152-158, 164-170, 175-186, and/or 188-196 of SEQ ID NO: 865; 11-19, 24-34, 41-48, 55-63, 68-81, 85-91, 100-106, 111-120, 131-138, 144-161, 168-176, 192-203, 213-225, 227-234, 236-243, 255-262, 265-274, 282-290, 296-301, 309-316, 349-359, 368-377, 384-390, 398-412, 417-433, 439-448, 467-475, 481-486, 501-508, 510-517, 521-532, and/or 538-545 of SEQ ID NO: 866; 4-42, 48-59, 74-88, 92-119, 121-149, 163-180, 185-195, and/or 199-209 of SEQ ID NO: 867; 5-26, 60-76, 104-114, 119-128, 136-141, 156-167, 186-198, 218-237, 260-267, 275-290, 309-318, and/or 328-335 of SEQ ID NO: 868; 5-17, 23-48, 60-73, 75-82, 98-108, 110-128, 146-160, 168-180, 191-213, 229-237, 240-252, 269-277, and/or 305-313 of SEQ ID NO: 869; 8-28, 53-62, 70-78, 81-89, 97-115, 125-148, 155-168, 174-186, 196-202, 207-214, 220-238, 241-256, 258-267, 284-290, 297-306, 312-317, 322-327, 330-344, 352-358, 367-385, 387-395, 400-414, 422-430, 438-455, 458-466, 491-507, 539-544, 561-566, 571-577, 598-604, 617-623, and/or 640-647 of SEQ ID NO: 870; 7-14, 24-32, 56-72, 95-100, 108-114, 123-138, 143-153, 203-221, 224-230, 260-269, 290-297, 302-308, 321-355, 364-370, 398-427, 434-439, 446-473, 505-510, 512-518, 536-546, 573-587, 589-595, 629-636, 683-709, 728-734, 778-786, 795-802, 825-830, 911-934, 944-956, 960-970, 977-985, 987-993, 1009-1015, 1027-1035, 1047-1052, and/or 1058-1065 of SEQ ID NO: 871;4-16, 21-36, 38-47, 54-64, 92-103, 117-126, 135-155, 157-200, 202-223, 231-239, and/or 246-262 of SEQ ID NO: 872; 4-10, 35-45, 56-92, 108-116, 127-133, 137-146, 156-186, 194-203, 225-234, 242-251, 272-283, 285-306, 310-315, 322-330, 358-371, 373-379, and/or 389-396 of SEQ ID NO: 873; 4-40, 47-59, 62-75, 81-87, and/or 107-113 of SEQ ID NO: 874; 6-13, 21-31, 44-54, 64-70, and/or 77-84 of SEQ ID NO: 875; 17-24, 26-41, and/or 50-55 of SEQ ID NO: 876; 24-32 of SEQ ID NO: 877; 15-28, and/or 36-44 of SEQ ID NO: 878; 4-25, 28-34, 37-43, 45-52, 59-69, 85-91, and/or 104-114 of SEQ ID NO: 879; 13-39, 51-63, 80-101, 141-149, 165-176, and/or 191-210 of SEQ ID NO: 880; 6-19 of SEQ ID NO: 881; 4-19, 23-42, 57-66, 98-114, 121-127, 148-155, 164-181, 194-204, 217-222, 248-258, 266-285, 288-296, 309-329, 331-342, 344-353, and/or 361-378 of SEQ ID NO: 882; 4-14, and/or 26-32 of SEQ ID NO: 883; 10-18, 29-62, 72-91, 106-120, 147-154, 185-195, 203-210, 220-238, 262-267, 275-285, 315-365, 376-388, 390-399, and/or 414-423 of SEQ ID NO: 884; 8-17, 43-49, 63-70, 79-86, and/or 89-100 of SEQ ID NO: 885; 4-19, 21-31, and/or 54-68 of SEQ ID NO: 886; 4-10, and/or 26-31 of SEQ ID NO: 887; 4-12, 21-30, and/or 37-51 of SEQ ID NO: 888; 4-11, and/or 20-46 of SEQ ID NO: 889; 4-10, and/or 23-28 of SEQ ID NO: 890; 4-28, and/or 32-50 of SEQ ID NO: 891; 4-25 of SEQ ID NO: 892; 35-53 of SEQ ID NO: 893; 14-20, 48-56, 63-68, and/or 79-87 of SEQ ID NO: 894; 34-40, and/or 50-62 of SEQ ID NO: 895; 23-34, and/or 59-72 of SEQ ID NO: 896; 4-16, 28-39, 62-68, and/or 85-97 of SEQ ID NO: 897; 10-20, 23-31, 35-42, and/or 48-62 of SEQ ID NO: 898; 4-44, 46-52, 54-64, and/or 70-85 of SEQ ID NO: 899; 4-12, and/or 24-40 of SEQ ID NO: 900; 10-22, 24-46, 52-57, and/or 74-81 of SEQ ID NO: 901; 10-20, 27-40, and/or 48-57 of SEQ ID NO: 902; 24-37 of SEQ ID NO: 903; 20-29, 39-45, 53-65, and/or 67-85 of SEQ ID NO: 904; 6-22, 25-41, 43-66, 74-84, 87-94, and/or 107-113 of SEQ ID NO: 905; 4-12, 17-23, and/or 39-62 of SEQ ID NO: 906; 4-13, 21-45, and/or 51-70 of SEQ ID NO: 907; 15-25, and/or 33-52 of SEQ ID NO: 908; 8-19, 44-53, 60-70, 78-85, and/or 97-107 of SEQ ID NO: 909; 13-23, 31-40, 59-66, 84-90, and/or 96-110 of SEQ ID NO: 910; 4-25, 37-48, 56-71, 83-97, 112-132, 140-150, and/or 152-157 of SEQ ID NO: 911; 4-17, 19-26, 41-49, 63-87, 92-99, and/or 113-131 of SEQ ID NO: 912; 4-10, and/or 17-23 of SEQ ID NO: 913; 4-19, 26-35, 43-50, and/or 61-72 of SEQ ID NO: 914; 5-10, 31-38, 42-70, and/or 84-99 of SEQ ID NO: 915; 12-26, and/or 48-55 of SEQ ID NO: 916; 4-10, 13-63, 69-81, 83-105, and/or 143-150 of SEQ ID NO: 917; 4-12, 18-29, and/or 49-68 of SEQ ID NO: 918; 19-25, 27-33, 43-84, 86-92, 111-118, 125-136, 138-147, 158-165, and/or 181-192 of SEQ ID NO: 919; 20-29, 50-56, 63-85, 89-98, and/or 120-128 of SEQ ID NO: 920; 4-11, and/or 41-47 of SEQ ID NO: 921; 14-27, and/or 50-62 of SEQ ID NO: 922; 10-19, 35-41, and/or 43-51 of SEQ ID NO: 923; 17-40, 47-66, and/or 70-78 of SEQ ID NO: 924; 549-576, and/or 595-622 of SEQ ID NO: 1007; 592-616 of SEQ ID NO: 1031; 9-22 of SEQ ID NO: 1032; 896-923 of SEQ ID NO: 317; 178-204, 222-248, 244-269, and/or 265-296 of SEQ ID NO: 320; 180-209, and/or 205-233 of SEQ ID NO: 321; 242-270, and/or 266-294 of SEQ ID NO: 322; 718-740, 328; 197-229, and/or 225-256 of SEQ ID NO: 345; 42-61 of SEQ ID NO: 359; 34-53 of SEQ ID NO: 425; 1522-1552 of SEQ ID NO: 431; 415-440 of SEQ ID NO: 462; 32-51 of SEQ ID NO: 463; 342-369, and/or 457-484 of SEQ ID NO: 466; 554-582, 578-606, and/or 632-659 of SEQ ID NO: 467; 12-33, and/or 27-48 of SEQ ID NO: 469; 52-81, 77-105, and/or 101-129 of SEQ ID NO: 471; 76-102 of SEQ ID NO: 472; 48-77 of SEQ ID NO: 473; 6-35 of SEQ ID NO: 474; 189-218, and/or 214-244 of SEQ ID NO: 456; 122-149 of SEQ ID NO: 459; 106-136 of SEQ ID NO: 460; 204-224 of SEQ ID NO: 477; 273-297 of SEQ ID NO: 301; 70-88 of SEQ ID NO: 302; 134-147 of SEQ ID NO: 303; 290-317, and/or 367-388 of SEQ ID NO: 304; 240-265 of SEQ ID NO: 305; 796-824 of SEQ ID NO: 306; 83-110, and/or 106-133 of SEQ ID NO: 308; 120-148 of SEQ ID NO: 309; 71-106 of SEQ ID NO: 310; 278-305 of SEQ ID NO: 312; 115-137of SEQ ID NO: 313; 378-400 of SEQ ID NO: 315; 111-137 of SEQ ID NO: 316; 3-19 of SEQ ID NO: 318; 103-119 of SEQ ID NO: 323; 89-116, 112-139, and/or 135-162 of SEQ ID NO: 326; 259-268 of SEQ ID NO: 390; 2-19 of SEQ ID NO: 501; 83-114 of SEQ ID NO: 488; 15-33 of SEQ ID NO: 496; 52-84, and/or 70-93 of SEQ ID NO: 498; 28-54 of SEQ ID NO: 502; 34-66 of SEQ ID NO: 514; 4-32, and/or 28-56 of SEQ ID NO: 528; 21-47 of SEQ ID NO: 513; 32-57 of SEQ ID NO: 490; 96-115 of SEQ ID NO: 542; 161-176 of SEQ ID NO: 543; 58-89, 85-116, and/or 112-143 of SEQ ID NO: 557; 97-115 of SEQ ID NO: 559; 84-106 of SEQ ID NO: 565; 3-19 of SEQ ID NO: 572; 38-63 of SEQ ID NO: 575; 33-64, 60-91, and/or 87-119 of SEQ ID NO: 580; 93-123 of SEQ ID NO: 558; 16-34 of SEQ ID NO: 563; 61-92, and/or 88-120 of SEQ ID NO: 593; 48-76, 72-100, 96-124, and/or 120-147 of SEQ ID NO: 568; 111-146 of SEQ ID NO: 569; 26-50, 46-71, and/or 67-92 of SEQ ID NO: 570; 11-46 of SEQ ID NO: 573; 92-127 of SEQ ID NO: 574; 46-78, 74-106, and/or 102-133 of SEQ ID NO: 582; 94-124 of SEQ ID NO: 584; 2-29 of SEQ ID NO: 585; 10-43 of SEQ ID NO: 597; 24-51, 47-74, and/or 70-98 of SEQ ID NO: 600; 15-42, and/or 38-58 of SEQ ID NO: 551; 259-268 of SEQ ID NO: 390; 66-94 of SEQ ID NO: 598; 17-43 of SEQ ID NO: 594; 178-198 of SEQ ID NO: 375; 441-473, 469-501, and/or 497-531 of SEQ ID NO: 385; 105-127 of SEQ ID NO: 387; 8-35, 36-63, and/or 64-91 of SEQ ID NO: 388; 216-231 of SEQ ID NO: 391; 203-222 of SEQ ID NO: 395; 180-210, 206-236, and/or 232-261 of SEQ ID NO: 404; 6-28 of SEQ ID NO: 405; 224-238 of SEQ ID NO: 408; 274-291 of SEQ ID NO: 411; 134-148 of SEQ ID NO: 413; 133-153 of SEQ ID NO: 414; 258-284 of SEQ ID NO: 416; 8-33, 28-53, and/or 49-74 of SEQ ID NO: 419; 103-127, 123-147, 143-166, and/or 162-185 of SEQ ID NO: 420; 179-206 of SEQ ID NO: 421; 15-27 of SEQ ID NO: 434; 240-261 of SEQ ID NO: 435; 386-402 of SEQ ID NO: 437; 57-74 of SEQ ID NO: 438; 343-375, 371-403, and/or 399-432 of SEQ ID NO: 448; 369-390 of SEQ ID NO: 450; 276-292 of SEQ ID NO: 452; 196-227, 223-254, 250-280, 284-311, 307-334, 330-356, and/or 352-378 of SEQ ID NO: 453; 253-271 of SEQ ID NO: 454; 419-432 of SEQ ID NO: 455; 24-51 of SEQ ID NO: 370; 259-268 of SEQ ID NO: 390; 23-48 of SEQ ID NO: 371; 179-198 of SEQ ID NO: 372; 431-455 of SEQ ID NO: 373; 319-349, 345-374, and/or 370-399 of SEQ ID NO: 374; 455-479, and/or 475-498 of SEQ ID NO: 376; 653-675 of SEQ ID NO: 377; 75-108 of SEQ ID NO: 378; 1362-1388 of SEQ ID NO: 379; 8-36, 32-60, and/or 56-84 of SEQ ID NO: 380; 1-25 of SEQ ID NO: 381; 65-88 of SEQ ID NO: 382; 102-134 of SEQ ID NO: 383; 104-131 of SEQ ID NO: 384; 206-231 of SEQ ID NO: 386; 5-23 of SEQ ID NO: 389; 510-536, and/or 546-577 of SEQ ID NO: 390; 300-326, and/or 1320-1353 of SEQ ID NO: 392; 205-240 of SEQ ID NO: 393; 971-1003 of SEQ ID NO: 394; 455-483, and/or 1232-1263 of SEQ ID NO: 396; 12-40 of SEQ ID NO: 397; 3-32 of SEQ ID NO: 398; 68-103 of SEQ ID NO: 399; 188-222 of SEQ ID NO: 400; 25-55 of SEQ ID NO: 401; 98-130 of SEQ ID NO: 402; 211-236 of SEQ ID NO: 403; 362-392 of SEQ ID NO: 406; 365-389 of SEQ ID NO: 407; 60-81 of SEQ ID NO: 409; 69-104 of SEQ ID NO: 410; 124-152, and/or 148-177 of SEQ ID NO: 412;74-102 of SEQ ID NO: 415; 1019-1051, 1162-1190, 1186-1214, 1210-1238, and/or 1234-1261 of SEQ ID NO: 417; 692-724 of SEQ ID NO: 423; 259-268 of SEQ ID NO: 390; 15-41, 37-62, and/or 58-83 of SEQ ID NO: 418; 59-87, 83-110, and/or 111-140 of SEQ ID NO: 422; 174-206 of SEQ ID NO: 424; 96-119 of SEQ ID NO: 426; 128-152 of SEQ ID NO: 427; 104-130 of SEQ ID NO: 428; 542-568 of SEQ ID NO: 429; 107-129 of SEQ ID NO: 430; 112-137 of SEQ ID NO: 432; 52-80 of SEQ ID NO: 433; 19-45 of SEQ ID NO: 436; 1113-1144 of SEQ ID NO: 441; 94-119, 110-135, and/or 136-160 of SEQ ID NO: 439; 89-115 of SEQ ID NO: 442; 474-496, and/or 492-515 of SEQ ID NO: 443; 14-40 of SEQ ID NO: 444; 422-448 of SEQ ID NO: 445; 294-333 of SEQ ID NO: 447; 113-140 of SEQ ID NO: 449; 8-36, 32-61, and/or 57-86 of SEQ ID NO: 451; 1-28, 120-147, and/or 143-170 of SEQ ID NO: 440; -14-11 of SEQ ID NO: 446; 96-124 of SEQ ID NO: 1042; 550-575, 571-596, and/or 592-616 of SEQ ID NO: 1031; 144-170 of SEQ ID NO: 1046; 79-100 of SEQ ID NO: 1048; 73-96 of SEQ ID NO: 1050; 21-43 of SEQ ID NO: 1051; 18-42 of SEQ ID NO: 1052; 16-50 of SEQ ID NO: 1053; 7-25 of SEQ ID NO: 1055; 8-44 of SEQ ID NO: 1056; 22-51 of SEQ ID NO: 1057; 2-25 of SEQ ID NO: 1059; 9-44 of SEQ ID NO: 1060; 6-34, 30-58, 54-82, and/or 78-105 of SEQ ID NO: 1061; 9-32 of SEQ ID NO: 1062; 23-46, and/or 42-65 of SEQ ID NO: 1063; 1-25 of SEQ ID NO: 1064; 17-43 of SEQ ID NO: 1065; 11-38 of SEQ ID NO: 1067; 44-72, 68-95, and/or 91-118 of SEQ ID NO: 1009; 163-187 of SEQ ID NO: 1043; 586-612 of SEQ ID NO: 1011; 259-284, 283-313, 309-339, and/or 335-365 of SEQ ID NO: 1012; 311-333 of SEQ ID NO: 1016; 245-269, 474-504, 500-530, and/or 526-555 of SEQ ID NO: 1018; 270-302, 298-330, and/or 326-358 of SEQ ID NO: 1021; 58-86, 82-109, 105-133, 325-353, 349-378, and/or 374-403 of SEQ ID NO: 1023; 9-33 of SEQ ID NO: 1032; 96-124 of SEQ ID NO: 1042; 447-475, 471-498, and/or 494-521 of SEQ ID NO: 1022; 285-316, 312-343, 339-371, 367-399, 515-541, 537-564, and/or 560-586 of SEQ ID NO: 1027; 149-175, 171-197, and/or 193-217 of SEQ ID NO: 997; 43-73, 69-99, 95-124, 163-189, 185-210, 206-231, 227-252, 248-273, 269-294, 313-340, 336-362, 358-384, 456-481, 477-502, and/or 498-523 of SEQ ID NO: 998; 136-163, 159-186, 193-217, 253-279, 275-301, 447-474, 470-496, 492-518, 519-547, and/or 543-572 of SEQ ID NO: 999; 31-58, 54-80, 76-102, 166-196, 222-246, 242-266, 284-310, 306-332, and/or; 328-354 of SEQ ID NO: 1000; 96-124 of SEQ ID NO: 1042; 35-58, 54-77, and/or; 73-96 of SEQ ID NO: 1001; 200-229, 225-253, 249-277, 495-522, 518-544, and/or 540-566 of SEQ ID NO: 1002; 238-267, 268-300, and/or; 301-330 of SEQ ID NO: 1003; 6-36, 32-62, 58-87, 210-237, 233-260, 256-282, 496-522, 518-543, and/or; 539-564 of SEQ ID NO: 1004; 26-53, 468-501, 497-530, 49-76, 72-98, 235-268, 253-283, 279-309, 305-334, 425-455, and/or; 439-472 of SEQ ID NO: 1005; 7-40, and/or; 36-69 of SEQ ID NO: 1006; 11-38, 34-61, 57-84, 126-153, 149-176, 172-198, 265-290, 286-311, and/or 307-331 of SEQ ID NO: 1045; 115-137 of SEQ ID NO: 313; 11-35 of SEQ ID NO: 1307; 1-25 of SEQ ID NO: 1312;8-32 of SEQ ID NO: 1313; 5-29 of SEQ ID NO: 1317; 10-34 of SEQ ID NO: 1318; 82-106 of SEQ ID NO: 1320; 3-27 of SEQ ID NO: 1321; 9-33 of SEQ ID NO: 1322; 1-25 of SEQ ID NO: 1323; 16-40 of SEQ ID NO: 1324; 4-35, and/or 31-61 of SEQ ID NO: 1325; 67-91 of SEQ ID NO: 1326; 25-52 of SEQ ID NO: 1327; 20-44 of SEQ ID NO: 1329; 1-25 of SEQ ID NO: 1330; 5-32, and/or 28-54 of SEQ ID NO: 1331; 14-38 of SEQ ID NO: 1332; 23-47 of SEQ ID NO: 1333; 8-32 of SEQ ID NO: 1334; 18-42 of SEQ ID NO: 1335; 3-27 of SEQ ID NO: 1336; 181-203 of SEQ ID NO: 1203; 450-474 of SEQ ID NO: 1204; 200-224, 220-245, and/or 241-266 of SEQ ID NO: 1205; 50-79, and/or 75-104 of SEQ ID NO: 1206; 195-219 of SEQ ID NO: 1207; 26-53, and/or 49-77 of SEQ ID NO: 1208; 107-136, and/or 132-162 of SEQ ID NO: 1209; 197-221 of SEQ ID NO: 1210; 10-34 of SEQ ID NO: 1211;48-80, and/or 76-107 of SEQ ID NO: 1212; 159-191, 187-218, 434-464, and/or 460-489 of SEQ ID NO: 1213; 66-90 of SEQ ID NO: 1214; 51-75, and/or 666-690 of SEQ ID NO: 1215; 99-123 of SEQ ID NO: 1216; 251-275 of SEQ ID NO: 1217; 115-137 of SEQ ID NO: 313; 102-129, and/or 125-151 of SEQ ID NO: 1218; 30-54 of SEQ ID NO: 1219; 138-162 of SEQ ID NO: 1220; 79-103 of SEQ ID NO: 1221; 101-125 of SEQ ID NO: 1222; 126-154, 150-178, and/or 174-202 of SEQ ID NO: 1223; 322-346 of SEQ ID NO: 1224; 418-442 of SEQ ID NO: 1225; 126-156, 152-182, 178-208, 436-465, 461-489, and/or 485-513 of SEQ ID NO: 1226; 42-75, 71-104, 134-161, 157-184, 181-209, and/or 205-233 of SEQ ID NO: 1227; 131-155, and/or 262-286 of SEQ ID NO: 1228; 43-69, and/or 65-90 of SEQ ID NO: 1229; 468-492 of SEQ ID NO: 1230; 90-115, 111-135, 131-155, and/or 151-175 of SEQ ID NO: 1231; 495-522, and/or 518-545 of SEQ ID NO: 1232; 45-72, and/or 68-95 of SEQ ID NO: 1233; 94-121, and/or 117-144 of SEQ ID NO: 1234; 8-32, and/or 337-361 of SEQ ID NO: 1235; 943-973, and/or 969-1000 of SEQ ID NO: 1236; 191-215 of SEQ ID NO: 1237; 70-97, and/or 93-120 of SEQ ID NO: 1238; 800-824, 820-844, and/or 840-864 of SEQ ID NO: 1242; 115-137 of SEQ ID NO: 313; 341-363, 359-381, 376-402, 398-424, and/or 420-445 of SEQ ID NO: 1241; 186-216 of SEQ ID NO: 1243; 103-127 of SEQ ID NO: 1244; 19-50, and/or 46-77 of SEQ ID NO: 1245; 80-107, 103-129, and/or 125-151 of SEQ ID NO: 1246; 406-430 of SEQ ID NO: 1247; 795-827, and/or 823-855 of SEQ ID NO: 1248; 404-428 of SEQ ID NO: 1249; 66-90, 86-110, and/or 106-130 of SEQ ID NO: 1250; 107-131 of SEQ ID NO: 1251; 524-548 of SEQ ID NO: 1252; 193-217, 293-323, 319-349, 345-375, and/or 371-400 of SEQ ID NO: 1253; 481-505 of SEQ ID NO: 1254; 33-58, and/or 54-78 of SEQ ID NO: 1255; 281-308, 304-331, and/or 327-354 of SEQ ID NO: 1256; 321-352 of SEQ ID NO: 1257; 174-198 of SEQ ID NO: 1258; 248-273, 269-293, and/or 289-313 of SEQ ID NO: 1259; 249-281, and/or 277-310 of SEQ ID NO: 1260; 31-55 of SEQ ID NO: 1261; 415-439, 540-566, and/or 562-589 of SEQ ID NO: 1262; 213-237 of SEQ ID NO: 1263; 243-267 of SEQ ID NO: 1264; 545-583 of SEQ ID NO: 1265; 73-97, and/or 240-264 of SEQ ID NO: 1267; 115-137 of SEQ ID NO: 313; 48-73, 69-93, and/or 89-113 of SEQ ID NO: 1266; 9-33 of SEQ ID NO: 1269; 375-399 of SEQ ID NO: 1270; 335-359, 461-489, 485-513, and/or 509-536 of SEQ ID NO: 1271; 30-62, and/or 58-90 of SEQ ID NO: 1272; 581-605 of SEQ ID NO: 1273; 101-131, and/or 127-157 of SEQ ID NO: 1274; 317-349, and/or 345-377 of SEQ ID NO: 1275; 534-558 of SEQ ID NO: 1276; 108-133, 234-261, 257-284, 280-307, and/or 303-330 of SEQ ID NO: 1277; 2-27, 23-48, 44-68, 82-106, 104-128, 152-176, and/or 373-397 of SEQ ID NO: 1278; 324-348 of SEQ ID NO: 1279; 196-223, and/or 219-246 of SEQ ID NO: 1280; 263-294, and/or 291-323 of SEQ ID NO: 1281; 183-207 of SEQ ID NO: 1282; 176-200 of SEQ ID NO: 1283; 297-321 of SEQ ID NO: 1284; 91-115 of SEQ ID NO: 1285; 11-41, 37-67, and/or 63-92 of SEQ ID NO: 1286; 157-190, and/or 186-219 of SEQ ID NO: 1287; 240-264 of SEQ ID NO: 1288; 51-75 of SEQ ID NO: 1289; 31-55 of SEQ ID NO: 1290; 166-190 of SEQ ID NO: 1291; 10-34 of SEQ ID NO: 1293; 115-137 of SEQ ID NO: 313; 554-579, 575-600, 596-621, and/or 617-642 of SEQ ID NO: 1292; 200-226, 222-248, and/or 244-269 of SEQ ID NO: 1295; 4-28 of SEQ ID NO: 1296; 476-503 of SEQ ID NO: 1297; 370-394 of SEQ ID NO: 1298; 129-153 of SEQ ID NO: 1299; 51-75 of SEQ ID NO: 1301; 88-112 of SEQ ID NO: 1302; 670-694, and/or 848-872 of SEQ ID NO: 1303; 164-196, 703-731, 764-796, 792-823, 192-223, 219-250, 438-463, 459-483, 479-503, 629-658, 654-683, and/or 679-707 of SEQ ID NO: 1306; 5-36 of SEQ ID NO: 461; 32-51 of SEQ ID NO: 463; 16-46 of SEQ ID NO: 468; 12-33, and/or 27-48 of SEQ ID NO: 469; 10-39 of SEQ ID NO: 470; 27-56, 52-81, 77-105, and/or 101-129 of SEQ ID NO: 471; 30-57, 53-80, and/or 76-102 of SEQ ID NO: 472; 48-77 of SEQ ID NO: 473; 6-35 of SEQ ID NO: 474; 233-257, 253-277, 273-297, and/or; 293-317 of SEQ ID NO: 301; 290-317, and/or; 367-388 of SEQ ID NO: 303; 240-265 of SEQ ID NO: 305; 796-824 of SEQ ID NO: 306; 624-653 of SEQ ID NO: 307; 36-64, 60-87, 83-110, and/or; 106-133 of SEQ ID NO: 308; 120-148 of SEQ ID NO: 309; 71-106 of SEQ ID NO: 310; 741-764, and/or; 760-783 of SEQ ID NO: 311; 450-483 of SEQ ID NO: 314; 111-137 of SEQ ID NO: 316; 896-923 of SEQ ID NO: 317; 565-595 of SEQ ID NO: 319; 178-204, 200-226, 222-248, 244-269, and/or 265-296 of SEQ ID NO: 320; 1343-1369, 180-209, 205-233, and/or; 229-258 of SEQ ID NO: 321; 242-270, 266-294, and/or; 290-318 of SEQ ID NO: 322; 259-268 of SEQ ID NO: 360; 278-305 of SEQ ID NO: 312; 115-137 of SEQ ID NO: 313;89-116, 112-139, and/or; 135-162 of SEQ ID NO: 326; 76-97, and/or; 93-114 of SEQ ID NO: 329; 39-66, 62-88, and/or; 84-110 of SEQ ID NO: 331; 244-274 of SEQ ID NO: 333; 548-572 of SEQ ID NO: 335; 165-200 of SEQ ID NO: 336; 1-35 of SEQ ID NO: 338; 662-695 of SEQ ID NO: 339; 232-256, and/or; 252-283 of SEQ ID NO: 342; 588-620 of SEQ ID NO: 343; 197-229, 225-256, and/or; 252-283 of SEQ ID NO: 345; 212-244, 240-272, and/or; 395-429 of SEQ ID NO: 347; 209-230 of SEQ ID NO: 348; 78-106, and/or 102-130 of SEQ ID NO: 349; 118-142 of SEQ ID NO: 350; 105-133, 129-156, and/or 152-180 of SEQ ID NO: 351; 147-175 of SEQ ID NO: 352; 16-44 of SEQ ID NO: 353; 102-131 of SEQ ID NO: 354; 328-355 of SEQ ID NO: 355; 436-465 of SEQ ID NO: 357; 139-166 of SEQ ID NO: 363; 373-401 of SEQ ID NO: 365; 114-148 of SEQ ID NO: 367; 23-48, 44-70, and/or 71-99 of SEQ ID NO: 369; 34-53 of SEQ ID NO: 425; 164-193, 189-218, and/or 214-244 of SEQ ID NO: 456; 1522-1552 of SEQ ID NO: 431; 17-49 of SEQ ID NO: 475; 122-149 of SEQ ID NO: 459; 106-136 of SEQ ID NO: 460; 26-51, 47-72, and/or 68-92 of SEQ ID NO: 476; 187-208, and/or 204-224 of SEQ ID NO: 477; 654-682 of SEQ ID NO: 361; 944-970, 966-992, and/or 988-1015 of SEQ ID NO: 364; 242-256, and/or 60-88 of SEQ ID NO: 457; 96-124 of SEQ ID NO: 1042; 550-575, 571-596, and/or 592-616 of SEQ ID NO: 1031; 9-22 of SEQ ID NO: 1032; 139-163, 159-183, 179-203, 199-220, 549-576, 572-599, and/or 595-622 of SEQ ID NO: 1007; 70-88 of SEQ ID NO: 302; 134-147 of SEQ ID NO: 303; 378-400 of SEQ ID NO: 315; 3-19 of SEQ ID NO: 318; 103-119 of SEQ ID NO: 323; 266-292 of SEQ ID NO: 324; 179-193 of SEQ ID NO: 325; 282-296 of SEQ ID NO: 327; 718-740 of SEQ ID NO: 328; 1-29, 30-58, and/or 59-87 of SEQ ID NO: 330; 54-69 of SEQ ID NO: 332; 33-56 of SEQ ID NO: 334; 71-84 of SEQ ID NO: 340; 60-70 of SEQ ID NO: 341; 17-41 of SEQ ID NO: 344; 110-127 of SEQ ID NO: 346; 101-122 of SEQ ID NO: 356; 408-427 of SEQ ID NO: 358; 42-61 of SEQ ID NO: 359; 40-59 of SEQ ID NO: 362; 178-193 of SEQ ID NO: 366; 518-545, and/or 541-568 of SEQ ID NO: 368; 564-591 of SEQ ID NO: 368; 415-440, 436-461, 457-482, and/or 478-503 of SEQ ID NO: 462; 1-29, 53-80, 76-103, and/or 99-126 of SEQ ID NO: 464; 342-366, 362-386, 382-406, and/or 402-428 of SEQ ID NO: 465; 342-369, 365-392, 388-415, 411-438, 434-461, and/or 457-484 of SEQ ID NO: 466; 530-558, 554-582, 578-606, and/or 632-659 of SEQ ID NO: 467; 34-42, 56-87, 95-133, 136-146, 157-213, 219-235, 246-282, 313-333, 358-394, and/or 196-215 of SEQ ID NO: 1365; 67-74, 88-94, 112-118, 127-138, 155-169, 171-180, 183-190, 196-205, 243-249, 260-271, 308-344, 346-373, 381-414, 416-457, 473-513, 515-524, 528-535, 539-544, 556-566, 572-580, 585-590, and/or 27-129 of SEQ ID NO: 1366; 4-16, 21-36, 38-47, 54-64, 92-103, 117-126, 135-155, 157-200, 202-223, 231-239, 246-262, and/or 128-153 of SEQ ID NO: 1367; 4-10, 16-30, and/or 11-43 of SEQ ID NO: 1369; 7-22, 52-77, 83-93, 101-111, 125-136, 139-157, 212-221, 231-239, 241-247, 264-273, 275-294, 329-336, 349-357, 365-379, 389-405, 419-434, 439-445, 456-462, 467-481, 493-506, 508-516, 522-545, 547-556, 566-583, 611-627, 655-670, 678-693, 717-724, 734-748, 756-766, 772-790, 797-808, 815-820, 825-831, 833-838, 851-868, 891-917, 919-926, 933-940, 944-953, and/or 246-271 of SEQ ID NO: 1370; 4-12, 14-31, 42-59, 61-69, 73-83, 96-103, 140-149, 153-165, 180-187, 199-208, 222-230, 232-240, 248-254, 256-270, 274-283, 289-299, 302-317, 322-328, 332-345, 351-365, 387-396, 419-432, 441-447, 453-466, 487-505, 508-524, 560-571, 580-590, 592-605, 625-633, 639-647, 652-658, 671-679, 722-728, and/or 660-694 of SEQ ID NO: 1371; 4-13, 26-39, 53-59, 68-74, 88-95, 102-119, 125-132, 136-150, 153-162, 165-175, 188-228, 238-245, 268-283, 285-307, 317-324, 326-343, 350-359, and/or 79-101 of SEQ ID NO: 1372; 10-37, 55-68, 71-78, 92-98, 115-122, 131-138, 149-158, 163-170, 172-189, 212-219, 239-257, 259-271, 289-302, 304-320, 322-340, 359-366, 373-384, 400-412, 444-453, 460-474, 485-527, and/or 187-224 of SEQ ID NO: 1373; 13-21, 27-36, 41-50, 55-64, 66-72, 74-90, 103-112, 127-136, 153-164, 166-186, 193-219, 224-242, 260-273, 278-294, 298-306, 328-334, and/or 142-171 of SEQ ID NO: 1374; 16-29, 31-41, 49-61, 63-81, 86-92, 107-114, 122-135, 155-177, 195-211, 245-252, 264-270, 273-279, 297-322, 327-334, 339-348, 371-378, 380-389, 402-408, 414-421, 424-430, 452-459, 481-488, 500-506, 543-556, 567-573, 588-594, 608-615, 628-633, 668-675, 683-689, 700-706, 735-750, 793-802, 816-822, 841-846, 848-855, 858-864, 894-913, 921-929, 941-948, 974-990, 993-1005, 1053-1068, 1096-1110, 1117-1123, 1126-1145, 1149-1168, 1191-1203, 1219-1225, 1239-1248, 1253-1265, 1297-1309, 1356-1370, 1373-1379, 1388-1395, and/or 372-393 of SEQ ID NO: 1375; 5-15, 29-37, 39-46, 51-60, 65-71, 73-97, 105-131, 137-152, 154-161, 173-185, 193-210, 214-222, 224-232, 241-255, 266-274, 277-289, 291-303, 307-338, 345-352, 358-371, 389-395, 402-422, 433-440, 444-465, 471-478, 498-513, 524-536, 542-558, 561-576, 584-602, 604-623, 631-639, 643-658, 667-683, 689-716, and/or 315-397 of SEQ ID NO: 1376; 7-25, 30-37, 39-60, 69-86, and/or 75-89 of SEQ ID NO: 1377; 16-30 of SEQ ID NO: 1378; 8-27 of SEQ ID NO: 1379; 4-22, 29-48, 50-58, 62-69, 71-78, and/or 6-36 of SEQ ID NO: 1380; 4-23, and/or 3-24 of SEQ ID NO: 1381; 4-12, 30-66, and/or 11-33 of SEQ ID NO: 1382; 4-9, 40-64, 68-82, and/or 54-72 of SEQ ID NO: 1383; 4-42, and/or 11-39 of SEQ ID NO: 1384; 15-24, 77-88, 90-103, 116-123, 134-144, and/or 23-33 of SEQ ID NO: 1385; 17-25, 47-56, 68-79, and/or 64-74 of SEQ ID NO: 1386; 4-12, 14-21, 27-33, and/or 7-25 of SEQ ID NO: 1387; 4-10, 25-37, and/or 5-23 of SEQ ID NO: 1388; 4-9, 14-29, 38-44, 49-67, 69-97, 118-128, 135-146, 151-157, 159-172, 196-203, 227-241, 253-259, 262-271, 284-295, 299-309, 343-353, 356-362, 392-406, 410-416, 429-441, 463-478, 503-509, and/or 495-511 of SEQ ID NO: 1389; 4-12, 24-33, 39-51, 57-63, 78-87, and/or 32-56 of SEQ ID NO: 1390; 8-15, 29-40, 48-54, and/or 33-56 of SEQ ID NO: 1391; 12-61, and/or 35-61 of SEQ ID NO: 1392; 8-27 of SEQ ID NO: 1393.

41. The hyperimmune serum-reactive antigen or fragment of claim 38, comprising at least 6 contiguous amino acids of any of SEQ ID NOs: 302-336, 338-600, 763-924, 997-1068, 1203-1336, or 1365-1393.

42. The hyperimmune serum-reactive antigen or fragment of claim 38, comprising at least 8 contiguous amino acids of any of SEQ ID NOs: 302-336, 338-600, 763-924, 997-1068, 1203-1336, or 1365-1393.

43. The hyperimmune serum-reactive antigen or fragment of claim 38, comprising at least 10 contiguous amino acids of any of SEQ ID NOs: 302-336, 338-600, 763-924, 997-1068, 1203-1336, or 1365-1393.

44. The hyperimmune serum-reactive antigen or fragment of claim 38, further defined as directed against an enteroaggregative E. coli, enterotoxigenic E. coli, S. flexneri and/or C. jejuni.

45. A pharmaceutical composition comprising a hyperimmune serum-reactive antigen or fragment of claim 38.

46. The pharmaceutical composition of claim 45, wherein the hyperimmune serum-reactive antigen or fragment is directed against an enteroaggregative E. coli, enterotoxigenic E. coli, S. flexneri and/or C. jejuni.

47. The pharmaceutical composition of claim 45, further defined as comprising at least two different hyperimmune serum-reactive antigens and/or fragments.

48. The pharmaceutical composition of claim 47, wherein the at least two different hyperimmune serum-reactive antigens and/or fragments are both directed against an enteroaggregative E. coli, enterotoxigenic E. coli, S. flexneri and/or C. jejuni.

49. The pharmaceutical composition of claim 45, further comprising an immunostimulatory substance.

50. The pharmaceutical composition of claim 49, wherein the immunostimulatory substance is a polycationic polymer, an immunostimulatory deoxynucleotide (ODN), a peptide containing at least two LysLeuLys motifs, a neuroactive compound, alum, or a Freund's complete or incomplete adjuvant.

51. The pharmaceutical composition of claim 50, wherein the polycationic polymer is a polycationic peptide.

52. The pharmaceutical composition of claim 50, wherein the neuroactive compound is human growth hormone.

53. The pharmaceutical composition of claim 45, further defined as a vaccine.

54. The pharmaceutical composition of claim 53, further defined as a vaccine for treatment and/or prevention of an enteroaggregative E. coli, enterotoxigenic E. coli, S. flexneri and/or C. jejuni infection.

55. A method of vaccinating a subject comprising:
obtaining a pharmaceutical composition of claim 45; and
administering the pharmaceutical composition to a subject; wherein the subject is vaccinated.

56. The method of claim 55, wherein the subject is a human.

57. The method of claim 55, further defined as a method of treating and/or preventing an enteroaggregative E. coli, enterotoxigenic E. coli, S. flexneri and/or C. jejuni infection in the subject.

58. The method of claim 55, wherein the hyperimmune serum-reactive antigen or fragment is directed against an enteroaggregative E. coli, enterotoxigenic E. coli, S. flexneri and/or C. jejuni.
